(19) United States
(12) Patent Application Publication
(10) Pub. No.: US 2026/0139223 A1
(43) Pub. Date: May 21, 2026

(54) GENE ACTIVATION AND INTERFERENCE TARGETS FOR EXHAUSTION/DYSFUNCTIONRESISTANT T CELL PRODUCTS AND USES THEREOF

(71) Applicants: The J. David Gladstone Institutes, a testamentary trust established under the Will of J. David Glads, San Francisco, CA (US); The Regents of the University of California, Oakland, CA (US)

(72) Inventors: Zachary Steinhart, San Francisco, CA (US); Alexander Marson, San Francisco, CA (US)

(21) Appl. No.: 19/120,196

(22) PCT Filed: Nov. 3, 2023
(86) PCT No.: PCT/US2023/036810

§ 371 Date: Apr. 10, 2025

Related U.S. Application Data
(60) Provisional application No. 63/422,243, filed on Nov. 3, 2022.

(51) Int. Cl. C12N 5/0783; A61K 35/17; A61K 40/11; A61K 40/42; A61P 35/00; C12N 5/10; C12N 9/22; C12N 15/113; C12N 15/85

(52) U.S. Cl. CPC C12N 5/0636; A61K 35/17; A61K 40/11; A61K 40/42; A61P 35/00; C12N 5/10; C12N 9/222; C12N 15/113; C12N 15/85; C12N 2310/20; C12N 2510/00; C12N 2830/002

(57) ABSTRACT

Provided herein are gene activation and interference targets for exhaustion/dysfunction-resistant t cell products and uses thereof.

### CROSS-REFERENCE TO RELATED APPLICATIONS

[0001] This application claims the benefit of U.S. Provisional Application No. 63/422,243, filed Nov. 3, 2022, the content of which is herein incorporated by reference in its entirety.

### BACKGROUND

[0002] Current T cell therapeutics for cancer are limited in scope and response rate due to limitations in T cell function, such as T cell exhaustion. T cell “exhaustion” is where repeated antigen exposure leads to a dysfunctional T cell state and incomplete tumor clearance. Exhausted T cells have limited proliferative, cytotoxic, and cytokine secretion capacities and have upregulated inhibitory immune checkpoint receptors.

### SUMMARY

[0003] Regulators that play a role in T cell exhaustion/dysfunction resistance are described herein as well as methods of using such regulators. Genome-wide CRISPR activation (CRISPRa) and CRISPR interference (CRISPRi) screens were performed in primary human T cells to identify genes that are upregulated or downregulated, respectively, to cause exhaustion/dysfunction resistance. These CRISPRa and CRISPRi screens discovered 37 and 69 genes (FDR<0.1), respectively, that when upregulated or downregulated caused exhaustion/dysfunction resistance.

[0004] Provided herein are modified T cells, lymphoid cells or myeloid cells comprising a modification of one of more genes selected from BATF, CUL3, CLASRP, CDKL3, EOMES, FOXL2NB, FOXO6, FOXO4, FOSB, FOSL1, FOXL2, GLIS3, GLI2, IRF4, IL2RA, INPP5D, IL2RB, ITPKA, ITPKB, IL10, IL9R, LIFR, LCK, LYN, NPM3, NQO1, PLEKHH3, PTEN, RFLNB, STAT5A, SHOC2, S100A13, TRAF3IP2. TMEM167B, TSR2, VAV1 or ZNF211, wherein the modification upregulates or increases expression of said gene in said modified T cells, lymphoid cells or myeloid cells as compared to a non-modified T cell, lymphoid cell or myeloid cell control. In one aspect, the modification is one or more deletion, substitution or insertion into one or more of said genes. One aspect provides an increase in expression by modification of one or more endogenous promoters of one or more of said genes. In aspect, the modified T cell, lymphoid cell or myeloid cell comprises one or more expression cassettes comprising a promoter operably linked to a nucleic acid segment comprising a coding region of any of said genes or a targeted knock-in of a cassette under the control of a selected endogenous promoter/gene regulatory element.

[0005] One aspect provides a modified T cell, lymphoid cell or myeloid cell comprising a modification of one of more of genes selected from CCNC, ELOB, ELOC, IGFL4, MED1, MED12, MED13. MN1, MED19, MEOX1, MOCS3, NQO2. PRDM14, SYCE1L, SYTL2, SRRD, SPIN1, UBE2E1, ARHGAP5. ARIH1, ARIH2, ATF7IP, ATF7IP2. ATXN7L3. BORCS8, CAND1, CASP3, CBFB, CDK13, CDKN2A, CFAP54, CISH, COPS7B, CPSF4L, CUL5, CUTA, DCUN1D3, DDA1, GABARAPL1, KDM5C, KIAA1551, KRTAP10-9, MADD, MAPKAP1, MED23, MED24, MYB, MYO5A, NFKBIA, PAK2, PDCL, PIK3R5, PTEN, RASA2. RNASE9, RNF7. RPS6KA1, SBNO2. SND1, ST8SIA5, TNIP1, TRIM56, TSPEAR. UBAP2L, UBE2F, UBE2L3, WDFY1, ZBTB21 or ZMYND8, wherein the modification downregulates or decreases expression of said gene in said modified T cell, lymphoid cell or myeloid cell as compared to a non-modified T cell, lymphoid cell or myeloid cell control. In one aspect, the modified T cell, lymphoid cell or myeloid cell comprises an exogenous inhibitory nucleic acid (e.g., RNAi, shRNA, siRNA).

[0006] Methods are described herein that involve in vivo or ex vivo modification of any of the genes listed in Table 1 or FIGS. 1-27 within at least one cell, such as a lymphoid or myeloid cell or a T-cell or combination thereof. For example, the modification can be one or more deletions, substitutions or insertions into one or more endogenous genomic sites of any of the genes listed in Table 1 or FIGS. 1-27. The modification can be reduction of expression or translation of any of the genes listed in Table 1 or FIGS. 1-27. The reduction of expression or translation can be by an inhibitory nucleic acid (e.g., RNAi, shRNA, siRNA or CRISPR (nuclease of epigenetic engineering). The modification can be increased expression of any of the genes listed in Table 1 or FIGS. 1-27. For example, the increased expression can be by modification of one or more promoters of any of the genes listed in Table 1 or FIGS. 1-27. The modification can be one or more CRISPR-mediated modifications or activations of any of the genes listed in Table 1 or FIGS. 1-27.

[0007] For example, genes discovered in the CRISPRa screen can be engineered for overexpression by cDNA transgene delivery, targeted genomic knock-in of a transgene, or promotor/epigenetic engineering at the endogenous locus. Conversely, genes discovered in the CRISPRi screen can be interfered with by gene knockout or promotor/epigenetic engineering. Additionally, protein products of the discovered genes can be activated or inhibited through biologics or small molecules to enhance T cell function, either post adoptive T cell therapy, as a standalone immunotherapy, or in combination with other immunotherapies such as bispecific T cell engagers or checkpoint blockade.

[0008] The methods also include administering at least one of the modified lymphoid cells, at least one of the modified myeloid cells, at least one of the modified T cells, or a combination thereof to a subject.

[0009] In some cases, the method can include incubating the at least one modified lymphoid cell, at least one modified myeloid cell, at least one modified T cell or a mixture thereof to form a population of modified cells. Such a population of modified cells can be administered to a subject. In some cases, the subject can have a disease or condition. For example, the disease or condition is an immune condition or cancer.

[0010] Also described are methods that involve contacting at least one test agent with test cells to provide a test assay mixture, and measuring: cellular proliferation of the test cells, cytokine release by the test cells, or a combination thereof, activation of the test cells; expression or activity of any of the genes listed in Table 1 or FIGS. 1-27 in the cells: or a combination thereof. The methods can also include comparing the measured results to control results. The control results can be results of the test cells measured without any of the test agents.

[0011] For example, the test cells can include lymphoid and/or myeloid cells. Examples of the test cells can include cytotoxic T cells, helper T cells, regulatory T cells, naive T cells, activated T cells, CD4 T cells, CD8 T cells, gamma delta T cells, chimeric antigen receptor (CAR) cells, natural killer (NK) cells, induced pluripotent stem cell-derived immune (e.g., lymphoid and/or myeloid) cells, or a combination thereof. The results so measured can be compared to results of a control cell mixture that includes the T cells and test cells measured without any of the test agents.

### DRAWINGS

[0012] FIGS. 1A-1C provide an overview of genome-wide CRISPRi/a screens for regulators of CD8+ CAR T cell fitness in an exhaustion/dysfunction model and demonstrates that chronic signaling of HA GD2 CAR drives CD8+ T cells to exhaustion/dysfunction.

[0013] FIG. 2 provides CRISPRi (loss-of-function) exhaustion/dysfunction screen results.

[0014] FIG. 3 demonstrates that genes encoding signal transduction proteins in IL-2 signaling pathway are depleted in both CARs.

[0015] FIG. 4 shows CRISPRi screen results—IL2R/STAT5 pathway genes play a role in both CAR Ts.

[0016] FIG. 5 shows CRISPRi screen results—several gene knockdowns were positively enriched in the HA-GD2 CAR condition.

[0017] FIG. 6 shows CRISPRi screen results—demonstrates that mediator complex genes negatively regulate T cell fitness in the HA-GD2 CAR condition.

[0018] FIG. 7 demonstrates that PI3K—MTORC2 pathway member knockout causes increased fitness specifically in the HA GD2 CAR condition.

[0019] FIG. 8 depicts CRISPRa (gain-of-function) exhaustion screen results.

[0020] FIG. 9 shows CRISPRa screen results—several genes were positively enriched in the HA-GD2 CAR condition.

[0021] FIG. 10 shows CRISPRa screen results—activation of IL2R and STAT5 were positively enriched in the HA-GD2 CAR condition.

[0022] FIG. 11 demonstrates that overexpression of several transcription factors increases fitness HA GD2 CAR T cells.

[0023] FIG. 12 shows CRISPRa screen results—selecting transcription factor hits for further characterization in arrayed format.

[0024] FIG. 13 depicts arrayed CRISPRa perturbations for screen validation and deeper phenotyping.

[0025] FIG. 14 demonstrates that proliferation assay validates CRISPRa hits.

[0026] FIG. 15 demonstrates that FOXL2NB CRISPRa greatly enhances in vitro target cell killing with HA GD2 CAR T cells.

[0027] FIG. 16 shows that FOXL2NB CRISPRa increases cytokine production and GranzymeB staining.

[0028] FIG. 17 FOXL2NB shares a bidirectional promoter with FOXL2.

[0029] FIG. 18 demonstrates that cDNA overexpression reveals FOXL2 as a driver of the exhaustion resistance phenotype.

[0030] FIG. 19 demonstrates that FOXL2 cDNA overexpression also increases killing in a CD19 CAR repetitive stimulation model.

[0031] FIG. 20 shows gene expression changes caused by FOXL2/FOXL2NB CRISPRa in non-exhausted T cells.

[0032] FIG. 21 demonstrates that FOXL2 maintains high IL2RA surface expression.

[0033] FIG. 22 provides NALM6-GD2 Killing across E:T ratios data.

[0034] FIG. 23 provides 143B GD2 CAR Killing data.

[0035] FIG. 24 provides 143B GD2 CAR Killing—E:T=3 data.

[0036] FIG. 25 provides 143B GD2 CAR Killing—E:T=3—Hours—90 data.

[0037] FIG. 26 provides CRISPRa—CD19 CAR and CRISPRa—HA-GD2 CAR data.

[0038] FIG. 27 provides NALM6-GD2 Killing with GD2 CAR T cells.

### DETAILED DESCRIPTION

[0039] Provided herein is the use of genome wide CRISPR activation (CRISPRa) and interference (CRISPRi) screens in primary human CD8⁺ T cells to discover genes that are upregulated or downregulated, respectively, to cause exhaustion/dysfunction resistance. To model exhaustion/dysfunction, CD8⁺ T cells were engineered to express the high-affinity anti-GD2 chimeric antigen receptor (GD2-CAR), which due to chronic CAR signaling mimics chronic antigen stimulation and drives cells to an exhausted state (Lynn et al. Nature. 2019 December; 576(7786):293-300. doi: 10.1038/s41586-019-1805-z. Epub 2019 Dec. 4; PMID:31802004). Pooled lentiviral genome-wide CRISPRa and CRISPRi perturbations were applied to GD2-CAR T cells and directly compared them with a gold-standard anti-CD19 CAR T cell non-exhausted control population. By measuring the abundance of sgRNA expressing cells over time in both GD2-CAR and CD19-CAR T cells in parallel, perturbations were determined that allowed for enhanced proliferation and survival, specifically in the exhausted context. The CRISPRa and CRISPRi screens discovered 37 and 69 genes (FDR<0.1), respectively, that when upregulated or downregulated caused exhaustion/dysfunction resistance (Table 1).

[0040] T cell therapeutics for cancer are currently of great interest in industry. Discoveries from these screens can be used to reprogram T cells for increased efficacy, potency, durability, and scope. This is particularly the case for solid tumors, where durable successes for T cell therapies have been limited, and T cell exhaustion/dysfunction is a major hurdle. Genes discovered in the CRISPRa screen can be engineered for overexpression by cDNA transgene delivery or promotor/epigenetic engineering at the endogenous locus. Conversely, genes discovered in the CRISPRi screen can be interfered with by gene knockout or promotor/epigenetic engineering. Additionally, protein products of the discovered genes can be activated or inhibited through biologics or small molecules to enhance T cell function, either post adoptive T cell therapy, as a standalone immunotherapy, or in combination with other immunotherapies such as bispecific T cell engagers or checkpoint blockade.

[0041] Current FDA approved T cell therapies include retroviral engineered CAR T cells for B cell derived hematologic cancers, where an extracellular B cell antigen-recognizing antibody is with an intracellular CD3ζ and co-receptor signaling domains to mediate T cell activation and effector response, including proliferation, production of cytokines, and target cell killing. These CAR T cell therapies generally do not have additional genetic modifications and are limited by primary and acquired resistance. Furthermore, T cell therapies have been limited in solid tumors, due to incomplete clearance and T cell exhaustion. Reprogramming T cells to overexpress or downregulate additional key genes identified by this invention can lead to increased T cell therapeutic function and decreased resistance, increasing the efficacy, potency, durability, and scope of these products.

### Modulating T Cell Exhaustion/Dysfunction

[0042] Genes that are upregulated or downregulated, respectively, to cause exhaustion/dysfunction resistance are provided in Table 1 or FIGS. 1-27. Any of the genes or the proteins they code are regulators of T cell exhaustion/dysfunction resistance that can be used in the methods and compositions described herein. Agents that modulate the listed regulators can also be used in the methods and compositions described herein. For example, to positively regulate T cell exhaustion/dysfunction one or more expression cassettes encoding one or more T cell exhaustion/dysfunction regulators, one or more agents that increase the expression or activity of such regulator, or agents that inhibit regulators of T cell exhaustion/dysfunction can be used. In one embodiment, antibodies, one or more expression cassettes encoding one or more T Cell exhaustion/dysfunction regulators, one or more agents that increase the expression or activity of such regulator, or agents that inhibit regulators of T cell exhaustion/dysfunction can be used. Agents that can modulate the T cell exhaustion/dysfunction regulators can include expression vectors, inhibitory nucleic acids, antibodies, small molecules, guide RNAs, nucleases (e.g., one or more cas nucleases), nuclease-dead cas variants (e.g., dCas9-VP64, dCas9-KRAB), or a combination thereof.

[0043] For example, T cells and other types of cells can be modified ex vivo to increase or decrease any of the T cell exhaustion/dysfunction regulators listed in Table 1 or FIGS. 1-27, and the modified cells can be administered to a subject that can benefit from such administration. In another example, the expression or activity of any of the T cell exhaustion/dysfunction regulators listed in Table 1 or FIGS. 1-27 can be modulated by in vivo administration of expression vectors, virus-like particles (VLP), CRISPR-related ribonucleoprotein (RNP) complexes, and combinations thereof that include or target any of the regulators listed in Table 1 or FIGS. 1-27. The regulator nucleic acids, regulator protein, regulator guide RNAs and CRISPR nucleases can be introduced via one or more vehicles such as by one or more expression vectors (e.g., viral vectors), virus like particles, ribonucleoproteins (RNPs), nanoparticles, liposomes, or a combination thereof. The vehicles can include components or agents that can target particular cell types (e.g., antibodies that recognize cell-surface markers), facilitate cell penetration, reduce degradation, or a combination thereof.

[0044] In addition, new agents can be identified by screening methods described herein that include, for example, evaluating assay mixtures containing one or more test agents and a population of T cells after incubation of the assay mixtures for a time and under conditions sufficient for determining whether the test agent can modulate the expression or activities of any of the regulators described herein. In some cases, the assay mixtures can include T cells and other types of cells, for example, other immune cells such as those that can interact with T cells. Useful test agents identified by such methods can, for example, increase or decrease the expression or activities of any of the regulators listed in any of Table 1 or FIGS. 1-27.

[0045] Hence, any of the regulators of T cell exhaustion/dysfunction, as well as agents that can modulate those regulators (i.e., modulators), can be used in the methods and compositions described herein.

[0046] The regulators and/or the agents that modulate the regulators can be evaluated by various assay procedures. Such assay procedures can also be used to identify new T cell exhaustion/dysfunction regulators. In some cases, the assay procedures can be used to evaluate the utility of a type (positive or negative effect), quantity, or extent of a regulator or modulating agent activity on T cell activity or T cell numbers.

[0047] For example, the methods for evaluating Applicants' regulators/agents or new regulators/agents can involve contacting one or more T cells (or a T cell population) with a test agent to provide a test assay mixture, and evaluating the test assay mixture for at least one of
[0048] Detecting and/or quantifying cytokine (e.g., interferon-γ (IFN-γ, interleukin-2(IL-2)) production;
[0049] Quantifying the numbers of T cells within the test assay mixture;
[0050] Detecting proliferation, such as via quantification of a dye that dilutes with cell divisions;
[0051] Detecting whether T cells in the test assay mixture express, e.g., an increase in expression or a decrease in expression, one or more of the regulators described herein;
[0052] Quantifying the number of cells that express, e.g., an increase in expression or a decrease in expression, one or more of the regulators expressed by a population of T cells; or
[0053] A combination thereof.

[0054] The T cells or T cell populations that are contacted with the test agent/test regulator can also include a variety of lymphoid and/or myeloid immune cells. For example, test agents can be introduced into an assay mixture that contains cytotoxic T cells, helper T cells, regulatory T cells, naive T cells, activated T cells, CD4 T cells, CD8 T cells, gamma delta T cells, chimeric antigen receptor (CAR) cells, natural killer (NK) cells, induced pluripotent stem cell-derived immune (e.g., lymphoid and/or myeloid) cells, or a combination thereof.

[0055] Test agents that exhibit in vitro activity for resistance to exhaustion of T cells or for modulating the amount or activity of any of the regulators described herein can be evaluated in animal disease models. Such animal disease models can include cancer disease animal models, immune system disease models, or combinations thereof.

### Genes Upregulated for T Cell Resistance/Dysfunction

[0056] The following genes are upregulated in T cells resistant to exhaustion/dysfunction (see Table 1): BATF, CUL3, CLASRP, CDKL3, EOMES, FOXL2NB, FOXO6, FOXO4, FOSB, FOSL1, FOXL2, GLIS3, GLI2, IRF4, IL2RA, INPP5D, IL2RB, ITPKA, ITPKB, IL10, IL9R, LIFR, LCK, LYN, NPM3, NQO1, PLEKHH3, PTEN, RFLNB, STAT5A, SHOC2, S100A13, TRAF3IP2, TMEM167B, TSR2, VAV1, and ZNF211.

[0057] Sequences and other information relating to these genes, and their encoded proteins, is available, for example from the NCBI and UniPROT databases, which are incorporated by reference.

[0058] A few examples of human protein sequences encoded by some of the genes detected as regulators of T cell exhaustion/dysfunction resistance are provided.

[0059] For example, an amino acid sequence for the protein encoded by the human basic leucine zipper transcription factor, ATF-like gene, also known as BATF, that is a regulator of T cell exhaustion/dysfunction resistance is available from the UniPROT database at accession no. Q16520 or accession number NP_006390, cDNA NM_006399 with gene location at Chr 14: 75.52-75.55 Mb.

| (SEQ ID NO: 1) | |
|---|---|
| 1 | aaagcgagcg acatgtccct ttggggagca gtccctctgc accccagagt gaggaggacg |
| 61 | caggggtcag aggtggctac agggcaggca gaggaggcac ctgtaggggg tggtgggctg |
| 121 | gtggcccagg agaagtcagg aagggagccc agctggtgac aagagagccc agaggtgcct |
| 181 | ggggctgagt gtgagagccc ggaagatttc agccatgcct cacagctccg acagcagtga |
| 241 | ctccagcttc agccgctctc ctccccctgg caaacaggac tcatctgatg atgtgagaag |
| 301 | agttcagagg agggagaaaa atcgtattgc cgcccagaag agccgacaga ggcagacaca |
| 361 | gaaggccgac accctgcacc tggagagcga agacctggag aaacagaacg cggctctacg |
| 421 | caaggagatc aagcagctca cagaggaact gaagtacttc acgtcggtgc tgaacagcca |
| 481 | cgagcccctg tgctcggtgc tggccgccag cacgccctcg ccccccgagg tggtgtacag |
| 541 | cgcccacgca ttccaccaac ctcatgtcag ctccccgcgc ttccagccct gagcttccga |
| 601 | tgcggggaga gcagagcctc gggaggggca cacagactgt ggcagagctg cgcccatccc |
| 661 | gcagaggccc ctgtccacct ggagacccgg agacagaggc ctggacaagg agtgaacacg |
| 721 | ggaactgtca cgactggaag ggcgtgaggc ctcccagcag tgccgcagcg tttcgagggg |
| 781 | cgtgtgctgg accccaccac tgtgggttgc aggcccaatg cagaagagta ttaagaaaga |
| 841 | tgctcaagtc ccatggcaca gagcaaggcg ggcagggaac ggttattttt ctaaataaat |
| 901 | gctttaaaag aaa |

(SEQ ID NO: 2)
MPHSSDSSDSSFSRSPPPGKQDSSDDVRRVQRREKNRIAAQKSRQRQTQKADTLHLESEDLEKQNAALRKEIKQLTE
ELKYFTSVLNSHEPLCSVLAASTPSPPEVVYSAHAFHQPHVSSPRFQP

[0060] An amino acid sequence for the protein encoded by the CUL3 gene (Culling 3 protein) that is a regulator of T cell exhaustion/dysfunction resistance is available from the UniPROT database at accession no. Q13618 or accession number NP_001244126. NP_001244127 or NP_003581. cDNA NM_001257197. NM_001257198 or NM_003590 with gene location at Chr 2: 224.47-224.59 Mb.

| (SEQ ID NO: 3) | |
|---|---|
| 1 | gaggacgacg ttcggcctgc gcagtgagat gtttgtccgt cgccgccgcc gccgccatcg |
| 61 | cggaggagcg cgataaaggg agccgagccg gacgtgaggg ggaccccgcg gagccgccgc |
| 121 | gccagcgcag ccccccagcc gcatcggagt cgccagagtc cgagccgccg ccgccgccgc |
| 181 | cgccgccccc gccgccgccg cggctgccca ggggccggcc agctccccag ccctgcccgg |
| 241 | gggtcgcgcc gccgccgccc ccagcgtcgc ccctagcctg cctgcccgcc ttaaatgtga |
| 301 | caccggcgtc gcggagcgcg acctgaagcc gccgccgggg aggggacgag caccatgtcg |
| 361 | aatctgagca aaggcacggg cagccggaag gacaccaaga tgcggatccg ggcctttccg |
| 421 | atgaccatgg atgaaaaata tgtaaacagc atttgggacc ttctgaaaaa tgcaattcaa |
| 481 | gaaatccagc gtaagaataa cagtggtctt agttttgagg agctctatag aaatgcatat |
| 541 | acaatggttt tgcataaaca tggagaaaag ctctacactg gactaagaga agttgttacc |
| 601 | gaacatctca taaataaggt gcgagaagat gtactaaatt cattgaataa caactttctt |
| 661 | caaacgctaa atcaagcttg gaatgatcat caaacagcta tggtgatgat tagagacata |
| 721 | ctaatgtaca tggaccgtgt gtatgtacaa caaaataatg tggagaacgt ctacaatttg |
| 781 | ggattaatta tttttcgaga tcaagttgta cgttatgggt gtattaggga tcatctacgg |
| 841 | caaactctat tggatatgat tgcaagagag cggaaaggag aagtcgtaga cagaggcgca |
| 901 | ataagaaatg cttgccagat gttaatgatt ttaggtctcg aaggaagatc agtctatgaa |
| 961 | gaagattttg aggctccttt tttggaaatg tctgcagaat tttttcagat ggaaagccag |
| 1021 | aaatttttag cagaaaatag tgcttcagta tatataaaga aagtagaagc tagaattaat |
| 1081 | gaagaaatag aacgagtgat gcactgcctt gacaaatcaa cggaagaacc aattgtaaag |
| 1141 | gtggttgaaa gggaactcat ttccaagcac atgaagacta tagtagaaat ggagaattct |
| 1201 | gggctagtac atatgttgaa aaatggaaag acagaagacc ttggttgcat gtacaagtta |
| 1261 | tttagtcgtg tgccaaatgg tttgaaaaca atgtgtgagt gtatgagttc ctatttgagg |
| 1321 | gagcaaggta aagctcttgc ttctgaagaa ggagaaggaa agaatcctgt tgactatatc |
| 1381 | cagggcttat tggatctgaa gagtaggttc gatcgcttcc tcctggaatc attcaacaat |
| 1441 | gaccgtctct ttaaacaaac tattgcgggt gactttgagt attttctcaa cctcaactcc |
| 1501 | aggtctcctg aatacctctc attatttatt gatgataagc tgaaaaaggg agtcaaaggg |
| 1561 | ctaacagaac aagaagtaga aacaatattg gataaagcaa tggtcctttt taggtttatg |
| 1621 | caagaaaaag atgtatttga acgttattat aaacaacact tggcaaggag acttctcaca |
| 1681 | aataaaagtg tttctgatga ctctgaaaaa aacatgatat ctaagttaaa gactgaatgt |
| 1741 | ggatgtcagt tcacgtcaaa actggaagga atgtttaggg atatgagcat ctcaaacaca |
| 1801 | acgatggatg aattcaggca acatctacag gcaactggtg tatctttagg tggtgttgat |
| 1861 | cttacagtcc gggtgctcac gacaggatat tggcccactc agtcagccac accaaagtgc |
| 1921 | aacatcccac cagcaccaag acatgctttt gagatattca gaaggttcta cttagccaaa |
| 1981 | cacagtggtc gacagctcac actccagcat catatgggtt ctgcagatct caatgccaca |
| 2041 | ttttatggac cagttaaaaa ggaagatgga tctgaagttg gtgttggagg tgcacaagta |
| 2101 | actggctcta atacacggaa gcacatattg caagtttcca ctttccagat gaccatatta |
| 2161 | atgctcttta ataatagaga aaaatacaca tttgaggaaa ttcagcaaga gacagatatc |
| 2221 | cctgaaagag agcttgttag agccctacag tcccccgcct gtggtaaacc aacacagcgg |
| 2281 | gttcttacaa aagaacccaa atcaaaggaa atagaaaatg gtcatatatt tacagttaat |
| 2341 | gatcaattca catccaaact acacagagtc aagattcaaa cagttgctgc caaacaaggt |
| 2401 | gaatccgacc cagagaggaa agaaacaagg cagaaagtag acgacgacag aaaacatgag |
| 2461 | atagaagctg ctatagtgcg gataatgaaa tctagaaaga agatgcagca caatgttcta |
| 2521 | gtagcggagg taactcagca gttgaaggcg cgattcttac caagtccagt tgttattaag |
| 2581 | aaacgtattg aaggacttat tgagagagaa tattcggcac gaacacctga ggatcgcaaa |
| 2641 | gtatacacat atgtagcata aaatgcgttc agaaatttga tttattcttg gactgtactc |
| 2701 | ttcgcatgga ctgggaagtt cttttaaatc attaaatatt aagacgacca tctcttctat |
| 2761 | taaattacag tacatgttct agaccattga gatcaagcct ttactccctt tgagagtttc |
| 2821 | caacatcagt tgattgagct tcaggcttta caacgtttat ccctgtagag atcatcttta |
| 2881 | cagttcctcg ggaaaatgtg aatgtgctgc gttttgtttt ctttactgta tgaaaacagg |
| 2941 | aaaataaaag agaaatttag aaaatacagc tcattacaat aaaattgttg gatttcattt |
| 3001 | ccccaggtct tcagtgttga tgtaaatgtg ttttgtagtg ttgcttagca ctttgcgcat |
| 3061 | tgtgtaagtt gggtaacaaa aatggcaaaa gaaatgcaga tttcccagtt atcttgctct |
| 3121 | gaagacattt ctttagctag tcttatttaa ttttaaaggt ttgataaata tacaaagacc |
| 3181 | caagcataca atttgagcat gctgtattct accacttgca cttactcatc ttctagcctt |
| 3241 | atgaccagga acctttgttt tyggctcaag tacacatcct gatttggttt ctccctgttg |
| 3301 | taatttgaga tttcccaaat taagtcttat aatgattagg ttttgttctg agttatttct |
| 3361 | agagaaagaa agtattttag tatgtgtaaa ttgtacaata atttttttgc tgttgtactc |
| 3421 | actgctaata gtggattgta tagggtggtg tttttatttc atttattgta gacaaaaata |
| 3481 | atgaatttag tatacacata cccactaatt caagtatgtc agagcacaaa gttggcagct |
| 3541 | ggttatattt aattcagccc ctctgaaaag cacatacagt ctatactttg tttataaata |
| 3601 | ccctaggtcc tccctgcccc taaatatata ttttggtgaa gctgtggtgc actattaatt |
| 3661 | ttctgtttca aaatgcaatc taaagatgca ataaatatga tgaccttgat agttttaatg |
| 3721 | aaatcttcaa ttcttgcagc tgtgttttgg aaagtgatta agcaatattt ctcaaacctg |
| 3781 | atgattcttg gatatttagc tattgtcctc caaagagtca tcgtttcacg ttttcaaaca |
| 3841 | tgtgctttgt gctgaagatt cttgtcagat atcctgtgct tccagagtat ttttatcttc |
| 3901 | aattttattt aattttgttt cattttgttt tcataagaca atgtttcaga tatgtaatgg |
| 3961 | ggcaaaccac tatagatttc tgttggatag aaaaatgaaa tgttactaat aagtttaaat |
| 4021 | tgacccttcg ttgactatca gtactgttga tacatttatt agaatgtatg tctcagaaga |
| 4081 | tggtttctgt ttaaatttat ggtcaagtta caacaactga attctaatat ggattaaaaa |
| 4141 | ctccacataa atatttttcc ccatgcgtct tgggttataa ttttcctttt agacttgcaa |
| 4201 | atatgctttt attgcaattt tgtctccatc tgtactgtag aattacaagc cttgtgctct |
| 4261 | ttatctctac attttccact tctacatgat gcaattaaga tgccaatgaa aagtattgtg |
| 4321 | aacattattc tcaggacact tttaccatac ttgagtagta ctaagtcagg tgtaacatgg |
| 4381 | aaagctaagg gtttcacctt ctgattttga cataattgga aattttctat aatggtaaga |
| 4441 | tgtttatagg aaagtaatgg tagttcatgt ttgagaattt ttttattgct ttcatttccc |
| 4501 | agttaaatga tatttaacac ctgggaaaac aggacagctc agattgtcga gttagtaaac |
| 4561 | atgagcgatg taaaaacttt atttgaaatc tcctaagtga gacattaaac attttagtgc |
| 4621 | tagtttaagc cattaaaagt aaagtttaag tttacgtcat tgtctcaagt gtggctgtaa |
| 4681 | aaatcagatc tagagtttag agacatactt gttaactttg gagcacaggt ttgatattta |
| 4741 | tgcttctaaa tacattaaaa catttctgaa ttgcagttga atggttggag attgctggcg |
| 4801 | atgtgatgct gcactgaaaa aactggtcac acaaaatgtt tatatgtttg actgcataag |
| 4861 | tattatttta ggtcataaag gttataacaa aatacattta acattgcttt ctttttagca |
| 4921 | agaggtcaca gatgctattt tttctcagtt tttaatgctt taatttgaaa gaaaaatgca |
| 4981 | tcctaaccat tccatcctgt tggtgcagag aaattttggt gatttattag aagactttta |
| 5041 | aggagggtgg atacatagtt tttcaactgc aaaaatcatg tcatctcttc agtaactgtt |
| 5101 | aaagtgtaat tctctgcctt cattatcaag tccaggacag tgtttatttt gaatcgttaa |
| 5161 | cattatttaa agactgaaaa ttcattgcaa ttagggaacg cacagcctca caaaaagtgg |
| 5221 | ttgtgattgc aaggattctt tatgtcagtg aacttaaaaa gggaatgggg gaagagatgc |
| 5281 | atgcctttct aaaggtatgc tagagtcacc tgtgtagcat tgtaattatg tactatcaaa |
| 5341 | cccccaagat gctgatgata ggccttctct gtaagaatcc ttctcatagt gaagcactgt |
| 5401 | tgatgttttg ttcaccggat atgttgggta gcagaaaagg cctagaacca gttttaagat |
| 5461 | tatgcctaca tctctagaag actagtacac tggcatcatc ttaggtttct aaatattatt |
| 5521 | taattcctta atttggaaag cagttttaat gtttacagtt taagatactc attttcagta |
| 5581 | actagtgtta aagattttta tctttgcctg tctactgtaa cttaagactt tcatagaata |
| 5641 | attttttata gagtatatgg tatattgtgt caatcttgga aggaaagctg ttgcatatca |
| 5701 | attgtaggtc atgtatttta ctatatgttg catagtattt tgcattctgt aaatacgaat |
| 5761 | gttaaaacat ttcaggtcag caaaattaga agtcatttct agtcctcaaa gcagaaataa |
| 5821 | ttagaaatgt taacatttaa gtgcttatca tatgccagat actattctga atattttatg |
| 5881 | tatattcatt catttagttg tcatattggc tttatgtgac ataactgtca ttataccagt |
| 5941 | gttgtccaag gttgctagca ggaaatggca gagccaggag ttggacctag gtttaatcct |
| 6001 | atccatattc catgttacaa attgacatga ttttccatat taaaaaattt tcatttattt |
| 6061 | tgtacctcat tcacatgaat agtaatgtga caaactaaag ttaatacatg aagcattgca |
| 6121 | atatggaatt ttgcacattt ttgttagctt tacattattt gctgatacca acttttggta |
| 6181 | ggaaggaaaa cagggaaggt gattgctgct attctggaat gtgtccattg aaaagaaaat |
| 6241 | aggcgctttg tctcctacaa tcttagagaa agttutacat acttaagtgg gtaccacaga |
| 6301 | taggcatgta ccttaaattc aaatctacag ttttacaaaa tgttttcctt tgtgtgcctt |
| 6361 | tcctatgtca aattagccag aaggaagaag agacgttaag aatggcagat aaatttaaca |
| 6421 | ggtaatgata cagagattgg ccattacgcc agctctcagg agaaaaacaa ctaggatgtc |
| 6481 | ttgaaacccg tgcatttaat tttagaaatg gcaaatttgt aagcgtgtca tttaagtaat |
| 6541 | ttgatgctca gttttagggt ctaagttgac ctcgagtgag ccatgcaaaa atagctttaa |
| 6601 | aattatacat gagcagctca aagtaaacgt gtatctttta gtaacaatga aattgtcaaa |
| 6661 | tttcaagatt ttaataacag gacagttcaa ctaataaact ttattgcata caagatttat |
| 6721 | tgcaatgtgg gaaaattaaa attctcagtc tcagaa |

(SEQ ID NO: 4)
MSNLSKGTGSRKDTKMRIRAFPMTMDEKYVNSIWDLLKNAIQEI
QRKNNSGLSFEELYRNAYTMVLHKHGEKLYTGLREVVTEHLINKVREDVLNSLNNNFL
QTLNQAWNDHQTAMVMIRDILMYMDRVYVQQNNVENVYNLGLIIFRDQVVRYGCIRDH
LRQTLLDMIARERKGEVVDRGAIRNACQMLMILGLEGRSVYEEDFEAPFLEMSAEFFQ
MESQKFLAENSASVYIKKVEARINEEIERVMHCLDKSTEEPIVKVVERELISKHMKTI
VEMENSGLVHMLKNGKTEDLGCMYKLFSRVPNGLKTMCECMSSYLREQGKALVSEEGE
GKNPVDYIQGLLDLKSRFDRFLLESFNNDRLFKQTIAGDFEYFLNLNSRSPEYLSLFI
DDKLKKGVKGLTEQEVETILDKAMVLFREMQEKDVFERYYKQHLARRLLTNKSVSDDS
EKNMISKLKTECGCQFTSKLEGMFRDMSISNTTMDEFRQHLQATGVSLGGVDLTVRVL
TTGYWPTQSATPKCNIPPAPRHAFEIFRRFYLAKHSGRQLTLQHHMGSADLNATFYGP
VKKEDGSEVGVGGAQVTGSNTRKHILQVSTFQMTILMLFNNREKYTFEEIQQETDIPE
RELVRALQSLACGKPTQRVLTKEPKSKEIENGHIFTVNDQFTSKLHRVKIQTVAAKQG
ESDPERKETRQKVDDDRKHEIEAAIVRIMKSRKKMQHNVLVAEVTQQLKARFLPSPVV
IKKRIEGLIEREYLARTPEDRKVYTYVA

[0061] An amino acid sequence for the protein encoded by the CLASRP gene that is a regulator of T cell exhaustion/dysfunction resistance is available from the UniPROT database at accession no. Q8N2M8 or accession number NP_001265368, NP_008987 or NP_008987.2, cDNA NM 001278439 or NM 007056 with gene location at Chr 19: 45.04-45.07 Mb.

| (SEQ ID NO: 5) | |
|---|---|
| 1 | ctttcatttc cgcttccggt gcgggccgcg cgcgagcgca gcggtgggag gcggcgacca |
| 61 | gccggttgag gccccaggct tggcctcacc acaatgtggc acgaggctcg gaagcatgag |
| 121 | cggaagcttc gaggcatgat ggtcgactac aagaagaggg cggagcggag acgggagtat |
| 181 | tatgaaaaga tcaagaagga cccagcccag ttcctgcagg tacatggccg agcttgcaag |
| 241 | gtgcacctgg attctgcagt cgccctggcc gctgagagcc ctgttaatat gatgccctgg |
| 301 | cagggggaca ccaacaacat gattgaccga ttcgatgtcc gtgcccacct ggaccacatc |
| 361 | cccgactaca ccccccctct gctcaccacc atctccccag aacaggagtc ggacgaacgg |
| 421 | aagtgtaact acgagcgcta cagaggcctg gtgcagaacg actttgccgg catctcagag |
| 481 | gagcagtgcc tgtaccagat ctacattgat gagttgtacg gaggcctcca gagacccagc |
| 541 | gaagatgaga agaagaagct ggcagagaag aaggcttcca tcggttatac ctacgaggac |
| 601 | agcacggtgg ccgaggtaga gaaggcggca gaaaagccag aggaggagga gtcagcggcc |
| 661 | gaggaggaga gcaactcgga cgaagatgag gtcatccccg acatcgacgt ggaggtggac |
| 721 | gtggatgaat tgaaccagga gcaggtggca gatctcaaca aacaggccac gacttatggc |
| 781 | atggccgacg gtgacttcgt caggatgctc cggaaagaca aggaggaggc agaggccatc |
| 841 | aagcatgcca aggctcttga ggaggagaag gccatgtact cgggacgccg ctctcgacgc |
| 901 | cagcggagag agtttcggga gaagcggctg aggggtcgca agatcagccc acccagctat |
| 961 | gcccgccgag acagccccac ctatgacccc tataagcggt caccctcgga gtccagctca |
| 1021 | gagtcccgct cccgctcccg ctccccgacc ccgggccgcg aggagaagat cacgttcatc |
| 1081 | accagttttg ggggcagcga tgaggaggca gccgcagccg ctgctgccgc agcagcatca |
| 1141 | ggagtcacca cagggaagcc ccccgcacct ccccagcctg gcggccccgc cccgggacgt |
| 1201 | aatgccagcg cccgccgccg ctcctcctcc tcctcctcct cctcttctgc ctcgaggacc |
| 1261 | tccagctccc gctccagctc tcgctccagc tcccgctctc gccgtggtgg gggctactac |
| 1321 | cgttccggcc gccacgcccg ctcccggtcc cgctcctggt cccgctcccg ctcccgctcc |
| 1381 | cggcgctatt cccggtcccg tagccgtggc cggcggcact caggtggggg ctcccgagac |
| 1441 | ggacaccggt actcccgctc gcccgcccgg cgtggtggtt acgggccccg gcgcagaagc |
| 1501 | aggagccgct cccactcagg ggaccgctac aggcggggcg gccggggcct caggcaccac |
| 1561 | agcagtagcc gcagccgcag cagctggtcc ctcagcccgt cccgcagtcg cagcctgact |
| 1621 | cgcagccgca gccatagccc cagccccagc cagagccgca gccgcagccg cagccgcagc |
| 1681 | cagagcccct cgccatcacc cgcaagagag aagctgacca ggccggccgc gtcccctgct |
| 1741 | gtgggcgaga agctgaaaaa gaccgaacct gccgctggta aagagacagg agctgccaaa |
| 1801 | cccaagctga cgcctcagga gaagctgaaa ctgaggatgc agaaggcgct gaacaggcag |
| 1861 | ttcaaggcgg ataagaaggc ggcacaagaa aagazgatcc agcaggagca tgagcggcag |
| 1921 | gagcgggaag acgagcttcg agccatggcc cgcaagatcc gcatgaagga gcgggaacgc |
| 1981 | cgagagaagg agagagaaga gtgggaacgc cagtacagcc ggcagagccg ctcaccctcc |
| 2041 | ccccgataca gtcgagaata cagctcttct cgaaggcgct caaggtcccg atcccgaagc |
| 2101 | ccccattacc gacattaggc agaagagtgg ggggtgggga ggacaagggg gtgggtaagg |
| 2161 | ggctcaagct gtgatgctgc tggttttatc tctagtgaaa taaagtcaaa agttatttaa |
| 2221 | ttcccgtca |

(SEQ ID NO: 6)
MWHEARKHERKLRGMMVDYKKRAERRREYYEKIKKDPAQFLQVH
GRACKVHLDSAVALAAESPVNMMPWQGDTNNMIDRFDVRAHLDHIPDYTPPLLTTISP
EQESDERKCNYERYRGLVQNDFAGISEEQCLYQIYIDELYGGLQRPSEDEKKKLAEKK
ASIGYTYEDSTVAEVEKAAEKPEEEESAAEEESNSDEDEVIPDIDVEVDVDELNQEQV
ADLNKQATTYGMADGDFVRMLRKDKEEAEAIKHAKALEEEKAMYSGRRSRRQRREFRE
KRLRGRKISPPSYARRDSPTYDPYKRSPSESSSESRSRSRSPTPGREEKITFITSFGG
SDEEAAAAAAAAAASGVTTGKPPAPPQPGGPAPGRNASARRRSSSSSSSSSASRTSSS
RSSSRSSSRSRRGGGYYRSGRHARSRSRSWSRSRSRSRRYSRSRSRGRRHSGGGSRDG
HRYSRSPARRGGYGPRRRSRSRSHSGDRYRRGGRGLRHHSSSRSRSSWSLSPSRSRSL
TRSRSHSPSPSQSRSRSRSRSQSPSPSPAREKLTRPAASPAVGEKLKKTEPAAGKETG
AAKPKLTPQEKLKLRMQKALNRQFKADKKAAQEKMIQQEHERQEREDELRAMARKIRM
KERERREKEREEWERQYSRQSRSPSPRYSREYSSSRRRSRSRSRSPHYRH

[0062] An amino acid sequence for the protein encoded by the CDKL3 gene that is a regulator of T cell exhaustion/dysfunction resistance is available from the UniPROT database at accession no. Q8IVW4, cDNA NM_001113575 with gene location at Chr 5: 13.42-13.43 Mb.

```
  (SEQ ID NO: 109)
      1 agaacgcagc aactccgccg gcgtttccat ggtggcaagt ggccggttcc ttgcggggct
    61 gagcaacaaa gtagtatcag tgttcggtgg ctccactgga actacgcaga gccagaccag
  121 cgggaccaca gaatgggctg aggcggcggc ggctgtttgg ataaagtcaa cagcgggacg
  181 tggggcgtga cgccgtagta aaagcccagc ttgaaaatgg agatgtatga aacccttgga
  241 aaagtgggag agggaagtta cggaacagtc atgaaatgta aacataagaa tactgggcag
  301 atagtggcca ttaagatatt ttatgagaga ccagaacaat ctgtcaacaa aattgcgatg
  361 agagaaataa agtttctaaa gcaatttcat cacgaaaacc tggtcaatct gattgaagtt
  421 tttagacaga aaaagaaaat tcatttggta tttgaattta ttgaccacac agtattagat
  481 gagttacaac attattgtca tggactagag agtaagcgac ttagaaaata cctcttccag
  541 atccttcgag caattgacta tcttcacagt aataatatca ttcatcgaga tataaaacct
  601 gagaatattt tagtatccca gtcaggaatt actaagctct gtgattttgg ttttgcacga
  661 acactagcag ctcctgggga catttatacg gactatgtgg ccacacgctg gtatagagct
  721 cccgaattag tattaaaaga tacttcttat ggaaaacctg tggatatctg ggctttgggc
  781 tgtatgatca ttgagatggc cactggaaat ccctatcttc ctagtagttc tgatttggat
  841 ttactccata aaattgtttt gaaagtgggc aatttgtcac ctcacttgca gaatatcttt
  901 tccaagagcc ccatttttgc tggggtagtt cttcctcaag ttcaacaccc caaaaatgca
  961 agaaaaaaat atccaaagct taatggattg ttggcagata tagttcatgc ttgtttacaa
1021 attgatcctg ctgacaggat atcatctagt gatcttttgc atcatgagta ttttactaga
1081 gatggattta ttgaaaaatt catgccagaa ctgaaagcta aattactgca ggaagcaaaa
1141 gtcaattcat taataaagcc aaaagagagt tctaaagaaa atgaactcag gaaagatgaa
1201 agaaaaacag tttataccaa tacactgcta agtagttcag ttttgggaaa ggaaatagaa
1261 aaagagaaaa agcccaagga gatcaaagtc agagztatta aagtcaaagg aggaagagga
1321 gatatctcag aaccaaaaaa gaaagagtat gaaggtggac ttggtcaaca ggatgcaaat
1381 gaaaatgttc atcctatgtc tccagataca aaacttgtaa ccattgaacc accaaaccct
1441 atcaatccca gcactaactg taatggcttg aaagaaaatc cacattgcgg aggttctgtg
1501 acaatgccac ccatcaatct aactaacagt aatttgatgg ctgcaaatct cagttcaaat
1561 ctctttcacc ccagtgtgag gttaactgaa agagcaaaaa agagacgcac ttcttcacaa
1621 tctattggac aagttatgcc taatagcagg caagaggatc caggtcctat tcaaagccaa
1681 atggagaagg gtatatttaa tgagcgaaca ggtcacagtg accaaatggc aaatgagaac
1741 aaaaggaagc tgaatttttc cagatctgac aggaaagaat tccattttcc agaattgcct
1801 gtcacaatac agtcaaaaga tacaaaagga atggaagtta aacagataaa aatgctgaag
1861 agggagtcaa agaaaacaga gtcatctaag ataccaactt tacttaacgt ggatcaaaat
1921 caagaaaaac aagagggtgg agatggccat tgcgagggga agaatttgaa gagaaacagg
1981 ttttttttct ggtagtgtct tttcttttac atag=ccaaa aaatacaaga tgacaactct
2041 tcccgtttta tttatctaca atagaagtgt gatgtgagtt gttgttaaga cagccatcca
2101 tgtgcatgag catcatccag ctttttttgt tagcaaaaca tttactgttt tcttttccct
2161 tttaagactc tgttgatgtg ataatttgat ttggaattat aaagtcatct cttctctgcc
2221 ta
(SEQ ID NO: 110)
MEMYETLGKVGEGSYGTVMKCKHKNTGQIVAIKIFYERPEQSVNKIAMREIKFLKQFHHE
NLVNLIEVFRQKKKIHLVFEFIDHTVLDELQHYCHGLESKRLRKYLFQILRAIDYLHSNN
IIHRDIKPENILVSQSGITKLCDFGFARTLAAPGDIYTDYVATRWYRAPELVLKDTSYGK
PVDIWALGCMIIEMATGNPYLPSSSDLDLLHKIVLKVGNLSPHLQNIFSKSPIFAGVVLP
QVQHPKNARKKYPKLNGLLADIVHACLQIDPADRISSSDLLHHEYFTRDGFIEKFMPELK
AKLLQEAKVNSLIKPKESSKENELRKDERKTVYTNTLLSSSVLGKEIEKEKKPKEIKVRV
IKVKGGRGDISEPKKKEYEGGLGQQDANENVHPMSPDTKLVTIEPPNPINPSTNCNGLKE
NPHCGGSVTMPPINLTNSNLMAANLSSNLFHPSVRLTERAKKRRTSSQSIGQVMPNSRQE
DPGPIQSQMEKGIFNERTGHSDQMANENKRKLNFSRSDRKEFHFPELPVTIQSKDTKGME
VKQIKMLKRESKKTESSKIPTLLNVDQNQEKQEGGDGHCEGKNLKRNRFFFW
```

[0063] An amino acid sequence for the protein encoded by the EOMES gene (eomesodermin also known as T-box brain protein 2 (Tbr2) is a protein that in humans is encoded by the EOMES gene) that is a regulator of T cell exhaustion/dysfunction resistance is available from the UniPROT database at accession no. 095936 or accession number NP_001265111. NP_001265112 or NP_005433, cDNA NM_001278182, NM_001278183 or NM_005442 with gene location at Chr 3: 27.72-27.72 Mb.

```
  (SEQ ID NO: 7)
      1 agccagctgc cgtctgcgct ttgcaaagca tgcagttagg ggagcagctc stggtgagct
    61 cagtgaacct gcctggcgcg cacttctacc cgctggagag tgcgcgaggc ggcagcggcg
  121 ggagcgctgg ccacctcccc agcgcggccc cctctcctca gaagttggac ttagacaaag
  181 cgtccaagaa gttttccggc agtctctcct gcgaggcggt gagcggggag cccgcagccg
  241 ccagcgcagg ggcccccgcg gccatgctta gtgacaccga cgccggggac gcatttgcca
  301 gcgctgcggc agtggccaag ccggggcccc cggacggccg caagggctcc ccctgcgggg
  361 aggaggagct gccctccgcc gctgcagccg ccgccgccgc cgccgccgcg gctgcggcca
  421 ctgcgcgcta ctccatggac agcctgagct ccgagcggta ctacctccag tcccccggtc
  481 ctcaggggtc ggagctggct gcgccctgct cactcttccc gtaccaggcg gcggctgggg
  541 cgccccacgg acctgtgtac ccggctccta acggggcgcg ctacccctac ggctccatgc
  601 tgccccccgg cggcttcccc gcggctgtgt gcccacccgg gagggcgcag ttcggcccag
  661 gagccggtgc gggcagtggc gcgggcggta gcagcggcgg gggcggcggc ccgggcacct
  721 atcagtacag ccagggggct ccgctctacg ggccgtaccc tggagccgca gcggcgggat
  781 cttgcggagg actggggggc ctgggggttc caggttctgg cttccgtgcc cacgtctacc
  841 tgtgcaaccg gcctctgtgg ctcaaattcc accgccacca aactgagatg atcattacga
  901 aacagggcag gcgcatgttt cctttcttga gcttcaacat aaacggactc aatcccactg
  961 cccactacaa tgtgttcgta gaggtggtgc tggcggaccc caaccactgg cgcttccagg
1021 ggggcaaatg ggtgacctgt ggcaaagccg acaataacat gcagggcaac aaaatgtatg
1081 ttcacccaga gtctcctaat actggttccc actggatgag acaggagatt tcattcggga
1141 aattaaaact caccaataac aaaggcgcaa ataacaacaa cacccagatg atagtcttac
1201 aatccttaca caaataccaa ccccgactgc atattgttga agttacagag gatggcgtgg
1261 aggacttgaa tgagccctca aagacccaga ctttracctt ctcagaaacg caattcattg
1321 cagtgactgc ctaccaaaac accgatatta ctcaactaaa gattgatcat aacccctttg
1381 caaaaggctt cagagacaac tatgattcca tgtacaccgc ttcagaaaat gacaggttaa
1441 ctccatctcc cacggattcc cctagatccc atcagattgt ccctggaggt cggtacggcg
1501 ttcaatcctt cttcccggag ccctttgtca acactttacc tcaagcccgc tattataatg
1561 gcgagagaac cgtgccacag accaacggcc tcctttcacc ccaacagagc gaagaggtgg
1621 ccaaccctcc ccagcggtgg cttgtcacgc ctgtccagca acctgggacc aacaaactag
1681 acatcagttc ctatgaatct gaatatactt ctagcacatt gctcccatat ggcattaaat
1741 ccttgcccct tcagacatcc catgccctgg ggtattaccc agacccaacc tttcctgcaa
1801 tggcagggtg gggaggtcga ggttcttacc agaggaagat ggcagctgga ctaccatgga
1861 cctccagaac aagccccact gtgttctctg aagatcagct ctccaaggag aaagtgaaag
1921 aggaaattgg ctcttcttgg atagagacac ccccttccat caaatctcta gattccaatg
1981 attcaggagt atacaccagt gcttgtaagc gaaggcggct gtctcctagc aactccagta
2041 atgaaaattc accctccata aagtgtgagg acattaatgc tgaagagtat agtaaagaca
2101 cctcaaaagg catgggaggg tattatgctt tttacacaac tccctaaaga gttattttaa
2161 cctcaaaaat tagctaactt tttgcagatg gacttggtgg tgttttttgt tgtcttcttt
2221 gcctaggttg ccaaaaagat gtttgccttc caccttgatg catcctgttt tgtgcaattc
2281 tctaaaagaa ggtgccaaag ctttttgatt gctgcaggta actgaaacaa acctagcatt
2341 tttaaaaaat aagattaatg gaagacttta aggtatttta aaattcgaag ggtatccaag
2401 gttctgtatt tatttattgg ggagacacta acccttcaaa gaagcaggct gtgaacattg
2461 ggtgcccagt gctatcagat gagttaaaac ctttgattct catttctatt tgtaaattct
2521 taagcaaata gaagccgagt gttaaggtgt tttgcttctg aaagagggct gtgccttccg
2581 tttcagaagg agacattttg ctgttacatt ctgccagggg caaaagatac taggcccagg
2641 agtcaagaaa agcttttgtg aaagtgatag tttcacctga ctttgattcc ttaacccccg
2701 gcttttggaa caagccatgt ttgccctagt ccaggattgc ctcacttgag acttgctagg
2761 cctctgctgt gtgctggggt ggccagtggg actcaggaga gagcaagcta aggagtcacc
2821 aaaaaaaaaa aaaaaaaaaa gggagaattt aaaagtgtac agttgtgtgt ttagatacac
2881 tatagaataa tgtggtatat attgtacaaa tagtctacat aggtgtctgg gataatgtaa
2941 aactggtgct ttggctttgt aaagaatttg caaatcactt aacagctgca ggggcaaggg
3001 gagagtttca tcatccccat gatatttggg aatattctgt ttacttctta gatagttaag
3061 aatgtattca gctactatgt actaacttga accgtgttta aggaaaactc ctatttcatc
3121 ctcttcttgc gccatccccs ctccctaact tggtaatgtg aagaaactaa aacctgatac
3181 cacagctcct ataggcattc tagagatctt ggatctttat gtacagtctt agtcattttt
3241 aataaatgtg gttcagtaag ggaa
(SEQ ID NO: 8)
MQLGEQLLVSSVNLPGAHFYPLESARGGSGGSAGHLPSAAPSPQ
KLDLDKASKKESGSLSCEAVSGEPAAASAGAPAAMLSDTDAGDAFASAAAVAKPGPPD
GRKGSPCGEEELPSAAAAAAAAAAAAATARYSMDSLSSERYYLQSPGPQGSELAAPC
SLFPYQAAAGAPHGPVYPAPNGARYPYGSMLPPGGFPAAVCPPGRAQFGPGAGAGSGA
GGSSGGGGGPGTYQYSQGAPLYGPYPGAAAAGSCGGLGGLGVPGSGFRAHVYLCNRPL
WLKFHRHQTEMIITKQGRRMFPFLSFNINGLNPTAHYNVFVEVVLADPNHWRFQGGKW
VTCGKADNNMQGNKMYVHPESPNTGSHWMRQEISFGKLKLTNNKGANNNNTQMIVLQS
LHKYQPRLHIVEVTEDGVEDLNEPSKTQTFTFSETQFIAVTAYQNTDITQLKIDHNPF
AKGFRDNYDSMYTASENDRLTPSPTDSPRSHQIVPGGRYGVQSFFPEPFVNTLPQARY
YNGERTVPQTNGLLSPQQSEEVANPPQRWLVTPVQQPGTNKLDISSYESEYTSSTLLP
YGIKSLPLQTSHALGYYPDPTFPAMAGWGGRGSYQRKMAAGLPWTSRTSPTVESEDQL
SKEKVKEEIGSSWIETPPSIKSLDSNDSGVYTSACKRRRLSPSNSSNENSPSIKCEDI
NAEEYSKDTSKGMGGYYAFYTTP
```

[0064] For example, an amino acid sequence for the protein encoded by the human FOXL2NB (FOXL2 neighbor protein) gene that is a regulator of T cell exhaustion/dysfunction resistance is available from the UniPROT database as accession no. Q6ZUU3, shown below as SEQ ID NO: 9.

```
  (SEQ ID NO: 9)
      1 MTRTPVGSAR TRPKPRKLGP QRGKALQASS RLSESPALVK KRMPDACTLG RAGIGLPKMC
    61 LHMAVRHSKA QKTGPGILQQ RQKPPAPRAS GGPALLGKRR GCSEAGSASL EPLSSSRAAA
  121 GCLNQVPLSP FLAGPRNTRR LPAPERERIE JAATLCLEGW PLRCLASKGK LHCVY
  (SEQ ID NO: 10)
      1 gagttcatct ccaagtcact ttctgtaaac gccccgcaca gcctggaccg gcctgccccc
    61 gcccagcgag cctcaggggc ccagccgaca gccaggctca cgcgcccttg aaatctgccg
  121 gtactcgctc tgcgggctgg gctgggagat gacgaggacc ccggtggggt ctgcccgcac
  181 ccggccaaag cccaggaagc tcgggcccca gcgaggaaag gcgctccaag cctcctcgcg
  241 gctttcagaa tccccagccc tggtgaagaa gaggatgcct gatgcgtgca ccctgggaag
  301 ggctggaatc ggtctcccca agatgtgcct tcacatggct gtccggcatt cgaaggctca
  361 gaaaacaggg ccgggaatcc tgcaacagcg gcagaagccg cccgcgcctc gggcttccgg
  421 cggcccagct ctactaggga agcgtcgcgg ctgctctgag gcaggcagcg cttcgctaga
  481 accactcagc tcgtcccgcg ccgccgccgg ctgcctgaac caggttccgc tgtccccttt
  541 cctagcggga ccccgaaaca cccggcggct tcccgctcct gagcgggaga gaatagagct
  601 tgctgcaacc ctctgcttgg agggatggcc tctgcggtgc ttggctagca aagggaagct
  661 tcactgtgtc tattagtaca tccccataca ctccacgcct caacaactgt cagcactcac
  721 tccctcccgg cccctcacag ggccctttgc acccacacct cagggactcg gtgtccctcc
  781 actcaggtca cgttactcca tccacttctc tctccttctc cctctgtcaa ctccaaatcc
  841 cctctagttc tccctcccct cctacttctc tcacactcac cagctacacg tactaattca
  901 gattttgcac atgttggtgg aaaacatgtc aagccaatgt gcagacccta aggcttttca
  961 cacgctgctc actttcgcat ctcacggtgc agaaggacca atgggctcca ggtttacaag
1021 cctgactccg agaagcctgt tgattctctg atgtccttgg cctgtgattc gggtgactgg
1081 gctgccacct gggtgttttc atgatgggac tgccgcacag accacagaga agctcaggta
1141 ctgagcacgt tccagataca ctttaacatg cacaggccac tcacacaggc tttatctctg
1201 tctcgaaact ctgctgagtt tgctgctcag accaacaagg tgcagcagca gacacccaca
1261 tagcaccagg tctgaagcca gtgggtatta gtctgcctgg ttgggattag caaagtcagt
1321 tactcacata tgtgcttggg agagaatagg ggagtggaga gagagagaga gatattgagg
1381 aagaggaaag agaagcgacc tcctactctg ggaagaactc acacatgaga gctgtttcct
1441 gttgttaagt gtctcactga gctcccctct ttctccccca ggaagggctt gagaggcagt
1501 agaccagagc tctgggctcc tctttacctt gctgatgttg gggtatgagt cctccaacac
1561 cattttgtcc caaggagtat gtgccccatc gtcaatcagg cagaatgcag ggcagttgtc
1621 ggcctttttc atggtggagg ccaactggga aaaaggcaga agggtctggg tcctgggcca
1681 agtgaggccc tcttccctcc aaagacccgt gggatgctct cagaggcgga ttctagggtg
1741 gtgggagctg ctgacaagtt tcctctgata tccctcatga catctatggc ccaaagccat
1801 tttgttcagc tctgaacagc gagtgccttg ccagtaggcc tcaggcttgc tggggaacat
1861 gatgtgttct taaaagttgc cttgttgcct ttctccacac ccagactgta agcgctgatg
1921 ggcagagact ctgccctcca cttctcactc agtgctcccc accaggatgg gcttaatgcc
1981 ttttaataga attagaaaat ggttctgctg gacagaattg ggaaatgcca ctttccttat
2041 aatgaagtta taatgaagtt agaatttcca agaaagggac tgtagctgag gaaaagcggt
2101 ttgatcattg acagccagct caggatctga gagttctttg ccatttgggg ttattatagc
2161 tgcatggcca tggtgctgaa ccttaggcaa gggcaaggac acctccctag ttcccagtca
2221 tggtgaggac ctgtctgaaa cattcaaact agactttact ggaaacagag aagtctctgc
2281 attcagggca gctggcttgc aaggtaaggc ctgcagtctc cacccgcacg ctaacccatg
2341 aggggatgcc agagagagcc cttccccctt ggtcctcatt cctggctcaa ttttctccca
2401 caaagcgggc actttctaaa gatgataggc aactgccatg gaggaaggca gttttagatg
2461 cctagctggc acaaagtcca gaggaaggga gggagaaggg ctgagttttg tattactgtt
2521 ctacctttgg agattttcct catgccaaga tagggtgtgt gtgtgtgtgt gtgtgtatgt
2581 gtgtgtgtat gtgtgcacta taactttatg aaacactttt tttttttttg agacagggtc
2641 tcactctgtt gcccaagctg gagtgcagtg gtgcaatctt ggcttaccgc agtctccacc
2701 tcccaggctc aagtgatccc cccatctcag cctcagcctc ccaagtagct gggactatgg
2761 gtgtgagcca acacactcag ctaatttttt tttttttttt ttggtatttt tggtagagac
2821 agggttttac catgtgggcc caactggtct tgagctcctg agctcagggt gatttgcctg
2881 cttcaacttc ccaaagtgtt gggattacag gtgtgagcca ccatgcccag tcagtttttt
2941 attttttatt taaacagttt tgggggaaca ggtggttttt gcttacatgg ataagttctt
3001 taatggtaat ttctgagatt ttggtgcact tgtcacccga gcattgtaca cggtacccag
3061 tgtgtaatct tttatccctc atccccctcc tacgcttccc cccccgagtc cccattatat
3121 aattcttttt ttcttctttt tgagacagag tctcactctg ttgcccaggc tggagtgcag
3181 tggcatgaac ttggcttact gcagcctcct gagttcaagt gattctcctg cctgaacctc
3241 ctgtgtagct gggactacag gcatgcacca ccatgcccag ctaatttttg tattttttgt
3301 agagatgggg tttcaccatg ttggccaggc tagtcttgaa ctcctaacct caagtgatct
3361 gcctattttg gcctcccaaa gtgttgggat tacaggcgtg cgccactgcg cctggtccat
3421 tatgtcattc ttatgccttt gcatcttcat agcttagctc ccacttataa atgaaaacac
3481 aggatatttg gttttccata cttgagttac ttcacttagt ataatggtct ccagctccat
3541 ccaggttgct gtgaatgcca ttattttgtt ccttuttatg gctgagtagt attccatggt
3601 gtatatatat cacattttct ttatccactc attggttgat gggcatttag ccttgttcca
3661 tatttttgta tgcagtataa cttacagatg gtaaacaata tacagcttga tgtattctga
3721 catgtaatgc agtatgtaac caccacctgg atcaagatat ggagcatttc tggcacttca
3781 gaaggttcct tcatatcttt ttccaatcaa tattgcctca aaagggaaac catatttgga
3841 tttctatcac cataaataac ctttgcctgc cttgagcctc gtataaatgg agcatatagc
3901 atgtatgcct ttatgtctag ttttttctgt gcaacatatt tttaatattc actggtcttg
3961 ttgcatgtgt cagacattta tttcttttta ttgctgtgta atattctagt atttgcttat
4021 ccatccatat gttgagggac atttgtttcc agtttttgga tatcataaat aaagctgctg
4081 tgcacattgt tgta
```

A cDNA sequence encoding the FOXL2NB protein is available at NCBI Reference Sequence: NM_001040061.3.

[0065] An amino acid sequence for the protein encoded by the FOXO6 (Forkhead box 06) gene that is a regulator of T cell exhaustion/dysfunction resistance is available from the UniPROT database at accession no. A0A1X9RU27 or accession number NP_001278210, cDNA NM_001291281 with gene location at Chr 1: 41.36-41.38 Mb.

```
  (SEQ ID NO: 11)
MAAKLRAHQVDVDPDFAPQSRPRSCTWPLPQPDLAGDEDGALGA
GVAEGAEDCGPERRATAPAMAPAPPLGAEVGPLRKAKSSRRNAWGNLSYADLITKAIE
SAPDKRLTLSQIYDWMVRYVPYFKDKGDSNSSAGWKNSIRHNLSLHTRFIRVQNEGTG
KSSWWMLNPEGGKTGKTPRRRAVSMDNGAKELRIKGKASKKKQLQAPERSPDDSSPSA
PAPGPVPAAAKWAASPASHASDDYEAWADERGGGRPLLGEAAELEDDEALEALAPSSP
LMYPSPASALSPALGSRCPGELPRLAELGGPLGLHGGGGAGLPEGLLDGAQDAYGPRA
RAGTPAYFGGCKGGAYGGGGGFGPPAMGALRRLPMQTIQENKQASFVPAAAPFRPGAL
PALLPPPPPAPRPGPVLGAPGELALAGAAAAYPGKGAAPYAPPAPSRSALAHPISLMT
LPGEAGAAGLAPSGHAAAFGGPPGGLLLDALPGPYAAAAAGPLGAAPDRFPADLDLDM
FSGSLECDVESIILNDFMDSDEMDENFDSALPPPPPGLAGAPPPNQSWVPG
  (SEQ ID NO: 12)
      1 gaggtgcagc cggcgctgag cgcggcaggc gcgggagctg gcgctggagc cggagcggcg
    61 gcggcggcag cattcaccgg gcggcggcgg cgcgggctcc ggcaccggct cgggctccgg
  121 catggtgcaa tccggcctcg tcccgggaga gcagggcccg tgcgcagggc cggcgcccgg
  181 ggagcggcgg cagcggcggt ggcggtggtg gctgcaggcg caggcaggcg gcaggtgcta
  241 gaagcggggc tgggcgaggt gtgtgcccgc tgggctcccg ggccgccgcc ccctcactgc
  301 ccaggtcttt ccctcccttc gtgctcccca gcgcgtccag ccccctgcct ccgcgcctcg
  361 gcccatggcg ccccgcggct gagacagcgc cgccagggac ccctcccgcg ggcctccccg
  421 gggcgtgcag atcccggagc cgcccgccca ccctccgcga agcctccctc ccctcctcgc
  481 ccgagccggg cgggaccatg gctgcgaagc tgcgagcgca tcaggtggac gtggacccgg
  541 acttcgcgcc gcagagccgg ccgcgctcgt gtacctggcc cctgccgcag cctgacttgg
  601 ccggcgacga ggacggagcg ctgggcgcag gggtggccga gggcgccgag gactgcgggc
  661 cggagcgccg ggctacggcc ccggcgatgg ccccagcgcc gcccctgggc gcggaggtcg
  721 gaccgctgcg gaaagcgaag agctctcggc ggaacgcgtg ggggaacctg tcctacgccg
  781 acctcatcac caaagccatc gagagcgccc cggacaagcg gctcacgctc tcgcagatct
  841 acgactggat ggtccgttac gtgccctact tcaaggataa aggcgacagc aacagctcgg
  901 ccggctggaa gaactccatc cggcacaacc tgtcgctgca cacccgtttc atccgcgtgc
  961 agaacgaggg caccggcaag agttcgtggt ggatgctgaa ccccgagggc ggaaagacag
1021 ggaagacccc gcggcgcagg gccgtgtcca tggacaacgg ggccaagttc ctgcgcatca
1081 agggcaaggc gagcaagaag aagcagctgc aggcgcccga gcgaagcccg gacgacagct
1141 ccccgagtgc gcccgccccg gggccggtgc ctgccgcagc caagtgggcc gccagccccg
1201 cctcgcacgc cagcgacgac tacgaggctt gggccgactt ccgcggcggc gggagacccc
1261 tgctcgggga ggcggccgag ctggaggacg acgaggccct ggaggccctg gcgccatcat
1321 cgccgctcat gtacccaagc cccgccagcg cgctgtcgcc ggcgctgggc tcgcgctgtc
1381 cgggtgagct gccccgcctg gccgagctgg gaggcccgct gggcctgcac ggcggcggcg
1441 gcgcggggct gcccgagggc ctgctggacg gcgcgcagga cgcgtacggg ccgcgggccc
1501 gcgccgggac gcccgcctac ttcggcggct gcaagggcgg cgcctacggc gggggcgggg
1561 gcttcgggcc gccggcgatg ggcgctctgc gccgtctgcc catgcagacc atccaggaga
1621 acaagcaggc cagcttcgtg ccggccgcgg cgcccttccg ccctggggcg ctgcccgcgc
1681 tgctgccgcc gccgccgccc gcgcccaggc ccggcccggt gctgggtgcg ccgggggagc
1741 tggcgctggc gggcgcagcc gccgcctacc ccggcaaagg ggcggccccg tacgcgccgc
1801 ccgcgccctc gcgcagtgcc ttagcccacc ccatcagcct tatgacgctg cccggcgagg
1861 cgggcgccgc gggcctggca ccgtcgggcc acgccgccgc cttcgggggc ccgcccggcg
1921 gcctcctgct ggacgctctg ccggggccct acgctgccgc cgccgccggg ccgctgggcg
1981 ccgcgcccga ccgcttcccg gccgacctgg acctcgacat gttcagcggg agcctcgagt
2041 gcgacgtgga gtccatcatc ctcaacgact tcatggacag cgacgaaatg gacttcaact
2101 tcgattcggc cctgcctcca ccgccgccgg gcctggccgg ggccccgccc cccaaccaga
2161 gctgggtgcc gggctgaggg ccgcctcccg cctccgggcg ccccgtcccg tccccagggg
2221 gcctctgtct tcccatcctg attcccgggt ccctgccccc gactctagct ccccaggagg
2281 cggccccagc ccagctaggg acccctctcg gaggccggcc gccggggaag gggagggagg
2341 ggccggggca ccccactgct cctgcccaca ctcctgagat ccaccccctt ctcctgggca
2401 ggaagcctgg gagaggaggc tgaattccag gctggctggg agtagggagg agcggggtgg
2461 gccgcctggt gtggacggtg gtcggggaag ccaactagga gatgggccag ggagcgttta
2521 caaatcttca gtttcatttg cggaggccta gccgagaccc cgcgcccacc ccaaacacgg
2581 atctgattcc cacttgacac actttcccac tggtcttagt ctcacccacc cgaagccagc
2641 aaccctctgc ggaaaactca cacctaccta tatccatcca ccctgagcag ccctccaccc
2701 ccaaatcgcc ctccgacgac cgccaccccc acagttcagt ctccccctcc catccctgcc
2761 ggccctcgct tctcccctcc cccgtcggag tcagtccctc tcttcaaccg cccccacccc
2821 ctagtactgg tctcagcttc tccagcgggc ctcagccccg tccaccccca accccgacgc
2881 ccctttctcc gcgccagttc tggcccttct cccatattta taagtgtccg gccgggacgg
2941 gcggtgggcg cggcgtcccc ggcgcgtatc gtaggcagtg taccgtggcc gtgccgtcag
3001 agtgtgcgtg tgcgtgtgtg ccgtgtcgag gctgtgtaga gtgcattgta cagcatattt
3061 tcatgaataa aattgtttta aatatt
```

[0066] An amino acid sequence for the protein encoded by the FOXO4 (Forkhead box protein 04) gene that is a regulator of T cell exhaustion/dysfunction resistance is available from the UniPROT database at accession no. P98177 or accession number NP_001164402 or NP_005929, 60 cDNA NM 001170931 or NM 005938 with gene location at Chr X: 71.1-71.1 Mb.

```
(SEQ ID NO: 13)
MDPGNENSATEAAAIIDLDPDFEPQSRPRSCTWPLPRPEIANQP
SEPPEVEPDLGEKVHTEGRSEPILLPSRLPEPAGGPQPGILGAVTGPRKGGSRRNAWG
NQSYAELISQAIESAPEKRLTLAQIYEWMVRTVPYFKDKGDSNSSAGWKNSIRHNLSL
HSKFIKVHNEATGKSSWWMLNPEGGKSGKAPRRRAASMDSSSKLLRGRSKAPKKKPSV
LPAPPEGATPTSPVGHFAKWSGSPCSRNREEADMWTTFRPRSSSNASSVSTRLSPLRP
ESEVLAEEIPASVSSYAGGVPPTLNEGLELLDGLNLTSSHSLLSRSGLSGFSLQHPGV
TGPLHTYSSSLESPAEGPLSAGEGCFSSSQALEALLTSDTPPPPADVLMTQVDPILSQ
APTLLLLGGLPSSSKLATGVGLCPKPLEAPGPSSLVPTLSMIAPPPVMASAPIPKALG
TPVLTPPTEAASQDRMPQDLDLDMYMENLECDMDNIISDLMDEGEGLDENFEPDP
  (SEQ ID NO: 14)
      1 gcagatggct gccccggcga gtggtaaaca gagacgtcag gagggggctg ctgcttggag
    61 caaaacaaaa gggaaacccg gggggcgggg ggtggggggg gttgataggg gaatcggtgc
  121 gggaataagg gaggccgcag ccgcggggac ccggacccta gtaagagtgg cgagaaggga
  181 agaggcgggg gaagggggag tcaggggagg ggcaagtgac gcgggggagc ggggcgtggg
  241 ggagggcagc aatccgggtg gaggaaattt gggaggagtg tccggggggc agcaacttaa
  301 aagggggagg gaactgcggc taaggagacg ttcggtgatg ggagcgcaat atatgagggg
  361 atacagtgcc tcaggtttaa aagagcagga agctgagtga gaggttgcag aaaaagtgtc
  421 ttcgctcggc agaggttaca ggtggcatct cagaaagagc tttgaggcta caggctgtag
  481 tcgggaaggg gatcggagaa ctgtgtgaag ggacagctta gggactagcg tcctgggact
  541 agggggaagt tcgcgacttt ctgaagactg gcaggaatgt gcctcctggc cctcgatgct
  601 tcccccctga ggggaggcat cgtgagggac tgtggcaggc ttcactgaac gctgagccgg
  661 ggaggtccaa ctccacgtat ggatccgggg aatgagaatt cagccacaga ggctgccgcg
  721 atcatagacc tagatcccga cttcgaaccc cagagccgtc cccgctcctg cacctggccc
  781 cttccccgac cagagatcgc taaccagccg tccgagccgc ccgaggtgga gccagatctg
  841 ggggaaaagg tacacacgga ggggcgctca gagccgatcc tgttgccctc tcggctccca
  901 gagccggccg ggggccccca gcccggaatc ctgggggctg taacaggtcc tcggaaggga
  961 ggctcccgcc ggaatgcctg gggaaatcag tcatatgcag aactcatcag ccaggccatt
1021 gaaagcgccc cggagaagcg actgacactt gcccagatct acgagtggat ggtccgtact
1081 gtaccctact tcaaggacaa gggtgacagc aacagctcag caggatggaa gaactcgatc
1141 cgccacaacc tgtccctgca cagcaagttc atcaaggttc acaacgaggc caccggcaaa
1201 agctcttggt ggatgctgaa ccctgaggga ggcaagagcg gcaaagcccc ccgccgccgg
1261 gccgcctcca tggatagcag cagcaagctg ctccggggcc gcagtaaagc ccccaagaag
1321 aaaccatctg tgctgccagc tccacccgaa ggtgccactc caacgagccc tgtcggccac
1381 tttgccaagt ggtcaggcag cccttgctct cgaaaccgtg aagaagccga tatgtggacc
1441 accttccgtc cacgaagcag ttcaaatgcc agcagtgtca gcacccggct gtcccccttg
1501 aggccagagt ctgaggtgct ggcggaggaa ataccagctt cagtcagcag ttatgcaggg
1561 ggtgtccctc ccaccctcaa tgaaggtcta gagcsgttag atgggctcaa tctcacctct
1621 tcccattccc tgctatctcg gagtggtctc tctggcttct ctttgcagca tcctggggtt
1681 accggcccct tacacaccta cagcagctcc cttttcagcc cagcagaggg gcccctgtca
1741 gcaggagaag ggtgcttctc cagctcccag gctctggagg ccctgctcac ctctgatacg
1801 ccaccacccc ctgctgacgt cctcatgacc caggtagatc ccattctgtc ccaggctccg
1861 actcttctgt tgctgggggg gcttccttcc tccagtaagc tggccacggg cgtcggcctg
1921 tgtcccaagc ccctagaggc tccaggcccc agcagtctgg ttcccaccct ttctatgata
1981 gcaccacctc cagtcatggc aagtgccccc atccccaagg ctctggggac tcctgtgctc
2041 acacccccta ctgaagctgc aagccaagac agaatgcctc aggatctaga tcttgatatg
2101 tatatggaga acctggagtg tgacatggat aacatcatca gtgacctcat ggatgagggc
2161 gagggactgg acttcaacht tgagccagat ccctgagtca tgcctggaag ctttgtcccc
2221 tgcttcagat gtggagccag gcgtgttcat atctactctt tacccttgag ccctccccag
2281 gaatttggga ccctgcttta gagctagggt ggggtctggt cacacacagg tgttgaagaa
2341 attataaaga taaagctgcc ccatctgggg acgatatggg gagggagatg ggaggggaaa
2401 ggggagaggg tttttctcac tgtgccaatt agggggtaag gccccctctc aggagccatc
2461 atcggctttc cccattccta cccacttagg ctttgtagca agatgagcaa tgctgttgga
2521 aatgtgaagt caccagtggc cttacccctg cctttgggag caggattttt ttgtagagag
2581 tcttatctga gctgagccag gctagctgga gcctgggatt tctatgcagt ggccccttag
2641 gccagtgatg tgcggtgggt gggctgttta ggggatctgg aagggccaag gtctgagcac
2701 tggagtggct cgccaggcca aatcaccctt agaaggctgc agataacaga aaggcttttt
2761 ataaactttt aaagaaatat aaacacaaat atagagattt tttaaccatg gcagggtgct
2821 agtggtgggc agaatgcttt tttttctttc tgaaggcttt gtgatagtga catgatacaa
2881 acactacaga caataaatat taggagacac agggaagtgg ggagaggtgg ggagtaatag
2941 taaacacagg gaagagctcc cctacggacc aggtatagag aaaggtctat gcagaaatag
3001 gttagagttt ccctaacaaa aaagctaacc caggtcccct cattccttca acttgtgcct
3061 gggagtgtgt ggtgttaggg tgcagccaca ctcttctatg acccagcatg ggttagtgct
3121 atggtgggag agtacattga aggcctggaa ttagcttggg gccagggaag ggactgggag
3181 gggagagaag agaaggaggg aaggatttag gatggtaaag ttaggtacag agacctccct
3241 gttcaaggcc cctgacagct gtccctgccc ttcttcccct tccctgactg caggggttat
3301 gtggaagtgt gtgtggcagc aggcagcggg gaggggagga acagggaagg gggagctggg
3361 gagcttggct gagggtctgg gaaatgagca gggatggggg gggatgtgga tcaggtttac
3421 tagcacctgc cagggaggcc atctggggct ccttctccac cccagccccc aaagcagccc
3481 ttcccccagt gccctttgca tcgtcccctc ccccacccct gctgtgggtt cccatcattt
3541 cctgtgtcag cgcctggcct acccagattg tatcatgtgc tagattggag tggggaagtg
3601 tgtcaaatca ataaatgaat aaattcaata aatgcctata acca
```

[0067] An amino acid sequence for the protein encoded by the FOSB gene that is a regulator of T cell exhaustion/dysfunction resistance is available from the UniPROT database at accession no. P53539 or accession number NP_001107643 or NP 006723, cDNA NM_001114171 or NM_006732 with gene location at Chr X: 71.1-71.1 Mb.

```
  (SEQ ID NO: 15)
MFQAFPGDYDSGSRCSSSPSAESQYLSSVDSFGSPPTAAASQEC
AGLGEMPGSFVPTVTAITTSQDLQWLVQPTLISSMAQSQGQPLASQPPVVDPYDMPGT
SYSTPGMSGYSSGGASGSGGPSTSGTTSGPGPARPARARPRRPREETLTPEEEEKRRV
RRERNKLAAAKCRNRRRELTDRLQAETDQLEEEKAELESEIAELQKEKERLEFVLVAH
KPGCKIPYEEGPGPGPLAEVRDLPGSAPAKEDGFSWLLPPPPPPPLPFQTSQDAPPNL
TASLFTHSEVQVLGDPFPVVNPSYTSSFVLTCPEVSAFAGAQRTSGSDQPSDPLNSPS
LLAL
  (SEQ NO: 16)
      1 attcataaga ctcagagcta cggccacggc agggacacgc ggaaccaaga cttggaaact
    61 tgattgttgt ggttcttctt gggggttatg aaatttcatt aatctttttt tttccgggga
  121 gaaagttttt ggaaagattc ttccagatat ttcttcattt tcttttggag gaccgactta
  181 ctttttttgg tcttctttat tactcccctc cccccgtggg acccgccgga cgcgtggagg
  241 agaccgtagc tgaagctgat tctgtacagc gggacagcgc tttctgcccc tgggggagca
  301 acccctccct cgcccctggg tcctacggag cctgcacttt caagaggtac agcggcatcc
  361 tgtgggggcc tgggcaccgc aggaagactg cacagaaact ttgccattgt tggaacggga
  421 cgttgctcct tccccgagct tccccggaca gcgtactttg aggactcgct cagctcaccg
  481 gggactccca cggctcaccc cggacttgca ccttacttcc ccaacccggc catagccttg
  541 gcttcccggc gacctcagcg tggtcacagg ggcccccctg tgcccaggga aatgtttcag
  601 gctttccccg gagactacga ctccggctcc cggtgcagct cctcaccctc tgccgagtct
  661 caatatctgt cttcggtgga ctccttcggc agtccaccca ccgccgccgc ctcccaggag
  721 tgcgccggtc tcggggaaat gcccggttcc ttcgtgccca cggtcaccgc gatcacaacc
  781 agccaggacc tccagtggct tgtgcaaccc accctcatct cttccatggc ccagtcccag
  841 gggcagccac tggcctccca gcccccggtc gtcgacccct acgacatgcc gggaaccagc
  901 tactccacac caggcatgag tggctacagc agtggcggag cgagtggcag tggtgggcct
  961 tccaccagcg gaactaccag tgggcctggg cctgcccgcc cagcccgagc ccggcctagg
1021 agaccccgag aggagacgct caccccagag gaagaggaga agcgaagggt gcgccgggaa
1081 cgaaataaac tagcagcagc taaatgcagg aaccggcgga gggagctgac cgaccgactc
1141 caggcggaga cagatcagtt ggaggaagaa aaagcagagc tggagtcgga gatcgccgag
1201 ctccaaaagg agaaggaacg tctggagttt gtgc-ggtgg cccacaaacc gggctgcaag
1261 atcccctacg aagaggggcc cgggccgggc ccgctggcgg aggtgagaga tttgccgggc
1321 tcagcaccgg ctaaggaaga tggcttcagc tggctgctgc cgcccccgcc accaccgccc
1381 ctgcccttcc agaccagcca agacgcaccc cccaacctga cggcttctct ctttacacac
1441 agtgaagttc aagtcctcgg cgaccccttc cccgttgtta acccttcgta cacttcttcg
1501 tttgtcctca cctgcccgga ggtctccgcg ttcgccggcg cccaacgcac cagcggcagt
1561 gaccagcctt ccgatcccct gaactcgccc tcccccctcg ctctgtgaac tctttagaca
1621 cacaaaacaa acaaacacat gggggagaga gacttggaag aggaggagga ggaggagaag
1681 gaggagagag aggggaagag acaaagtggg tgtgtggcct ccctggctcc tccgtctgac
1741 cctctgcggc cactgcgcca ctgccatcgg acaggaggat tccttgtgtt ttgtcctgcc
1801 tcttgtttct gtgccccggc gaggccggag agctggtgac tttggggaca gggggtggga
1861 aggggatgga cacccccagc tgactgttgg ctctctgacg tcaacccaag ctctggggat
1921 gggtggggag gggggcgggt gacgcccacc ttcgggcagt cctgtgtgag gattaaggga
1981 cgggggtggg aggtaggctg tggggtgggc tggagtcctc tccagagagg ctcaacaagg
2041 aaaaatgcca ctccctaccc aatgtctccc acacccaccc tttttttggg gtgcctaggt
2101 tggtttcccc tgcactcccg accttagctt attgatccca catttccatg gtgtgagatc
2161 ctctttactc tgggcagaag tgagcccccc ccttaaaggg aattcgatgc ccccctagaa
2221 taatctcatc cccccacccg acttcttttg aaatgtgaac gtccttcctt gactgtctag
2281 ccactccctc ccagaaaaac tggctctgat tggaatttct ggcctcctaa ggctccccac
2341 cccgaaatca gcccccagcc ttgtttctga tgacagtgtt atcccaagac cctgccccct
2401 gccagccgac cctcctggcc ttcctcgttg ggccgctctg atttcaggca gcaggggctg
2461 ctgtgatgcc gtcctgctgg agtgatttat actgtgaaat gagttggcca gattgtgggg
2521 tgcagctggg tggggcagca cacctctggg gggataatgt ccccactccc gaaagccttt
2581 cctcggtctc ccttccgtcc atcccccttc ttcctcccct caacagtgag ttagactcaa
2641 gggggtgaca gaaccgagaa gggggtgaca gtcccccatc cacgtggcct ctctctctct
2701 cctcaggacc ctcagccctg gcctttttct ttaaggtccc ccgaccaatc cccagcctag
2761 gacgccaact tctcccaccc cttggcccct cacatcctct ccaggaaggg agtgaggggc
2821 tgtgacattt ttccggagaa gatttcagag ctgaggcttt ggtaccccca aacccccaat
2881 atttttggac tggcagactc aaggggctgg aatctcatga ttccatgccc gagtccgccc
2941 atccctgacc atggttttgg ctctcccacc ccgccgttcc ctgcgcttca tctcatgagg
3001 atttctttat gaggcaaatt tatatttttt aatatcgggg ggtggaccac gccgccctcc
3061 atccgtgctg catgaaaaac attccacgtg ccccttgtcg cgcgtctccc atcctgatcc
3121 cagacccatt ccttagctat ttatcccttt cctggtttcc gaaaggcaat tatatctatt
3181 atgtataagt aaatatatta tatatggatg tgtgtgtgtg cgtgcgcgtg agtgtgtgag
3241 cgcttctgca gcctcggccc aggtcacgtt ggccctcaaa gcgagccgtt gaattggaaa
3301 ctgcttctag aaactctggc tcagcctgtc tcgggctgac ccttttctga tcgtctcggc
3361 ccctctgatt gttcccgatg gtctctctcc ctctgtcttt tctcctccgc ctgtgtccat
3421 ctgaccgttt tcacttgtct cctttctgac tgtccctgcc aatgctccag ctgtcgtctg
3481 actctgggtt cgttggggac atgagatttt attttttgtg agtgagactg agggatcgta
3541 gatttttaca atctgtatcs ttgacaattc tgggcgcgag tgtgagagtg tgagcagggc
3601 ttgctcctgc caaccacaat tcaatgaatc cccgaccccc ctaccccatg ctgtacttgt
3661 ggttctcttt ttgtattttg catctgaccc cggggggctg ggacagattg gcaatgggcc
3721 gtcccctctc cccttggttc tgcactgttg ccaataaaaa gctcttaaaa acgca
```

[0068] An amino acid sequence for the protein (Fos-related antigen 1 (FRA1)) encoded by the FOSL1 gene that is a regulator of T cell exhaustion/dysfunction resistance is available from the UniPROT database at accession no. P15407 or accession number NP_001287773, NP_001287784, NP_001287785, NP_001287786, or NP_005429, cDNA NM_001300844, NM_001300855, NM_001300856, NM_001300857, or NM_005438 with gene location at Chr 11: 65.89-65.9 Mb.

```
  (SEQ ID NO: 17)
MFRDFGEPGPSSGNGGGYGGPAQPPAAAQAAQQKFHLVPSINTM
SGSQELQWMVQPHFLGPSSYPRPLTYPQYSPPQPRPGVIRALGPPPGVRRRPCEQISP
EEEERRRVRRERNKLAAAKCRNRRKELTDFLQAETDKLEDEKSGLQREIEELQKQKER
LELVLEAHRPICKIPEGAKEGDTGSTSGTSSPPAPCRPVPCISLSPGPVLEPEALHTP
TLMTTPSLTPFTPSLVFTYPSTPEPCASAHRKSSSSSGDPSSDPLGSPTLLAL
  (SEQ ID NO: 18)
      1 gagtcagaac ccagcagccg tgtaccccgc agagccgcca gccccgggca tgttccgaga
    61 cttcggggaa cccggcccga gctccgggaa cggcgggcgg tacggcggcc ccgcgcagcc
  121 cccggccgca gcgcaggcag cccagcagaa gttccacctg gtgccaagca tcaacaccat
  181 gagtggcagt caggagctgc agtggatggt acagcctcat ttcctggggc ccagcagtta
  241 ccccaggcct ctgacctacc ctcagtacag ccccccacaa ccccggccag gagtcatccg
  301 ggccctgggg ccgcctccag gggtacgtcg aaggccttgt gaacagatca gcccggagga
  361 agaggagcgc cgccgagtaa ggcgcgagcg gaacaagctg gctgcggcca agtgcaggaa
  421 ccggaggaag gaactgaccg acttcctgca ggcggagact gacaaactgg aagatgagaa
  481 atctgggctg cagcgagaga ttgaggagct gcagaagcag aaggagcgcc tagagctggt
  541 gctggaagcc caccgaccca tctgcaaaat cccggaagga gccaaggagg gggacacagg
  601 cagtaccagt ggcaccagca gcccaccagc cccctgccgc cctgtacctt gtatctccct
  661 ttccccaggg cctgtgcttg aacctgaggc actgcacacc cccacactca tgaccacacc
  721 ctccctaact cctttcaccc ccagcctggt cttcacctac cccagcactc ctgagccttg
  781 tgcctcagct catcgcaaga gtagcagcag cagcggagac ccatcctctg acccccttgg
  841 ctctccaacc ctcctcgct: tgtgaggcgc ctgagcccta ctccctgcag atgccaccct
  901 agccaatgtc tcctcccctt cccccaccgg tccagctggc ctggacagta tcccacatcc
  961 aactccagca acttcttctc catccctcta atgagactga ccatattgtg cttcacagta
1021 gagccagctt ggggccacca aagctgccca ctgtttctct tgagctggcc tctctagcac
1081 aatttgcact aaatcagaga caaaatattt cccatttgtg ccagaggaat cctggcagcc
1141 cagagacttt gtagatcctt agaggtcctc tggagcccta accccttcca gatcactgcc
1201 acactctcca tcaccctctt cctgtgatcc acccaaccct atctcctgac agaaggtgcc
1261 actttaccca cctagaacac taactcacca gccccactgc cagcagcagc aggtgattgg
1321 accaggccat tctgccgccc cctcctgaac cgcacagctc aggaggcgcc cttggcttct
1381 gtgatgagct gatctgcgga tctcagcttt gagaagcctt cagctccagg gaatccaagc
1441 ctccacagcg agggcagctg ctatttattt tcctaaagag agtattttta tacaaaccta
1501 ccaaaatgga ataaaaggct tgaagctgtg gcctgagtgc ctcactggac ccagaggcca
1561 atgggagagt atttggagcc ctaggtccca gccttagctc tacagactca ctgcatgacc
1621 ttggacaaat tctttgatat ttttggactt tgtcttatct gacaagtggg gctacatccg
1681 ctcggcctca tctccgggac tg
```

[0069] An amino acid sequence for the protein (Forkhead box protein L2) encoded by the FOXL2 gene that is a regulator of T cell exhaustion/dysfunction resistance is available from the UniPROT database at accession no. P58012 or accession number NP_075555, cDNA NM_023067 with gene location at Chr 3: 138.94-138.95 Mb.

```
  (SEQ ID NO: 19)
MMASYPEPEDAAGALLAPETGRTVKEPEGPPPSPGKGGGGGGGT
APEKPDPAQKPPYSYVALIAMAIRESAEKRLTLSGIYQYIIAKFPFYEKNKKGWQNSI
RHNLSLNECFIKVPREGGGERKGNYWTLDPACEDMFEKGNYRRRRRMKRPFRPPPAHF
QPGKGLFGAGGAAGGCGVAGAGADGYGYLAPPKYLQSGFINNSWPLPQPPSPMPYASC
QMAAAAAAAAAAAAAAGPGSPGAAAVVKGLAGPAASYGPYTRVQSMALPPGVVNSYNG
LGGPPAAPPPPPHPHPHPHAHHLHAAAAPPPAPPHHGAAAPPPGQLSPASPATAAPPA
PAPTSAPGLQFACARQPELAMMHCSYWDHDSKTGALHSRLDL
  (SEQ ID NO: 20)
      1 agaacagagc gaggctcctg gcgcactagg gactccagga ggcagctccg ccagagacgc
    61 gggtcgtgct tcgggaaacc ggggggcggg gggaggggaa gagcgcagaa aagaaaaccc
  121 accaaggcgg ggactggcct gagcggggag gggcggcgag gccggagccc ctctctgttg
  181 ggcggactcc ccatggccag aggctgagct ccactcccgc cggccgctcc ctaggggaag
  241 gggaaggaga ggggagagca gcgacaggcc tccagcaagc aagcgcgggc ggcatccgca
  301 gtctccagaa gtttgagact tggccgtaag cggactcgtg cgccccaact ctttgccgcg
  361 ccagcgcctg gagcggagag cagaggcggc ccggccgcgg cgcgccggct ttgtcatgat
  421 ggccagctac cccgagcccg aggacgcggc gggggccctg ctggccccag agaccggtcg
  481 cacagtcaag gagccagaag ggccgccgcc gagcccaggc aagggcggtg ggggtggcgg
  541 cgggacagcc ccggagaagc cggacccggc gcagaagccc ccgtactcgt acgtggcgct
  601 catcgccatg gcgatccgcg agagcgcgga gaagaggctc acgctgtccg gcatctacca
  661 gtacatcatc gcgaagttcc cgttctacga gaagaataag aagggctggc aaaatagcat
  721 ccgccacaac ctcagcctca acgagtgctt catcaaggtg ccgcgcgagg gcggcggcga
  781 gcgcaagggc aactactgga cgctggaccc ggcctgcgaa gacatgttcg agaagggcaa
  841 ctaccggcgc cgccgccgca tgaagaggcc cttccggccg ccgcccgcgc acttccagcc
  901 cggcaagggg ctcttcgggg ccggaggcgc cgcaggcggg tgcggcgtgg cgggcgccgg
  961 ggccgacggc tacggctacc tggcgccccc caagtacctg cagtctggct tcctcaacaa
1021 ctcgtggccg ctaccgcagc ctccctcacc catgccctat gcctcctgcc agatggcggc
1081 agccgcagcg gctgcagcag ctgcggctgc agccgcgggc cccggtagcc ctggcgcggc
1141 cgctgtggtc aaggggctgg cgggcccggc cgcctcgtac gggccgtaca cacgcgtgca
1201 gagcatggcg ctgccccccg gcgtagtgaa ctcgtacaat ggcctgggag gcccgccggc
1261 cgcacccccg cctccgccgc acccccaccc gcatccgcac gcacaccatc tgcacgcggc
1321 cgccgcaccg ccgcctgccc caccgcacca cggggccgcc gcgccgccgc cgggccagct
1381 cagccctgcc agcccagcca ccgccgcgcc cccggcgccc gcgcccacca gtgcgccggg
1441 cctgcagttc gcttgtgccc ggcagcccga gctcgccatg atgcattgct cttactggga
1501 ccacgacagc aagaccggcg cgctgcattc gcgcctcgat ctctgagagc ccaccgcatg
1561 ccggtgcaga cggatgcgag gatgcaggga cgcgcgacgc cggccccggt cgcagccgac
1621 gacgccgccg ccagcctgac ctcacaccct ctgggcccgc ctctggagcc agcgcccagg
1681 gtccctctgt gctttttcgc tttcctaagc tcctgtcgct cctctttgtc ccctcagttt
1741 atgtcctcct gtgctcacct ccctgacctc tgtgaccttg cactcccctg gcctgaagct
1801 gcctctctgc gcgctttcta ctgggctcgt ctctttccgg agccccagcg tctcctgccc
1861 aaattcaccg cggaaagggc ccggggcgga ggtgcgaccg ggcgtcggca gcgcagacct
1921 cttggccttc tctcacaggt cggtgcgctc gctctccgcg ttccccgccc gactgccgtg
1981 cagtccatgg ctagacgcgc cggacaggac tgatggcggg accgcgctgc ccgagaaagg
2041 gacggaccaa tacgtgtgtt tgctccgcga accctcttga agctgttcag aagccgcttg
2101 ccgcggggcc cactaggcgg ggcgggggtt gggacccagc gggagccggg gcagcctggc
2161 tccacggcct gtactcggtt tacaccgcgg gcgggggggg agggaggctg cgtttcctcc
2221 gctatcagtc ccgtcgcttc gggcacctcc gggccccggc ggctggctaa tgttttgttt
2281 gaaagatcgg tcgaactttc taagagagta tttaaaaaaa aaaaaaggaa aaaaaattca
2341 ccgggcaacc ggggaagtat tgtggccttg gagtttgcta aatccaaata tgaaaatcaa
2401 aagctttagt attcctcatc ttctcttctg gaagatttgc gttagagttt ttgttgggcc
2461 ttcaaaaagc tgtgttcaga gttaggagaa tatatccaat aaaagatggt ttcgtctacc
2521 aattggggaa gtttcaccct ctccctatct gaagaaaaaa atcaaaaaca aatgtccccg
2581 gatctttcga tgcaagtcct ggaggcaggg agatcactgc ctgcctggcc cacgctgctg
2641 ggacggctcg tcctccctgc tttttgtttt tcaaacctcc tgcttctccc accttgggaa
2701 ggagaaatgt gaaacccggc agcggccgac ctaggcggtc ttgtggcccg gagccggccc
2761 ggcccgaaaa ccatagacct gcttgtactg tagcttgttg tttgggggac caaattttct
2821 agagagaact agagcactus tcttgtgttt tttttttt tttttttttt ttgccttgtc
2881 gattcccgaa taaattttgt gttccttctt ttaa
```

[0070] An amino acid sequence for the protein (GLIS family zinc finger 3) encoded by the GLIS3 gene that is a regulator of T cell exhaustion/dysfunction resistance is available from the UniPROT database at accession no. Q8NEA6, cDNA BC033899 with gene location at Chr 9: NC_000009.12 (3824127 . . . 4490465, complement).

| | |
|---|---|
| (SEQ ID NO: 21) | |
| MMVQRLGLISPPASQVSTACNQISPSLQRAMNAANLNIPPSDTRSLISRESLASTTLSLTESQSASSMKQEW | |
| SQGYRALPSLSNHGSQNGLDLGDLLSLPPGTSMSSNSVSNSLPSYLEGTESSHSPYPSPRHSSTRSHSARSK | |
| KRALSLSPLSDGIGIDENTIIRTSPTSLVAYINGSRASPANLSPQPEVYGHFLGVRGSCIPQPRPVPGSQKG | |
| VLVAPGGLALPAYGEDGALEHERMQQLEHGGLQPGLVNHMVVQHGLPGPDSQSAGLFKTERLEEFPGSTVDL | |
| PPAPPLPPLPPPPGPPPPYHAHA | LHHPELGPHAQQLALPQATLDDDGEMDGIGGKHCCRWIDCSALYDQQE |
| ELVRHIEKVHIDQRKGEDFTCFWAGCPRRYKPENARYKLLIHMRVHSGEKPNKCTFEGCEKAFSRLENLKIH | |
| LRSHTGEKPYLCQHPGCQKAFSNSSDRAKHQRTHLDTKPYACQIPGCTKRYTDPSSLRKHVKAHSSKEQQAR | |
| KKLRSSTELHPDLLTDCLTVQSLQPATSPRDAAAEGTVGRSPGPGPDLYSAPIFSSNYSSRSGTAAGAVPPP | |
| HPVSHPSPGHNVQGSPHNPSSQLPPLTAVDAGAERFAPSAPSPHHISPRRVPAPSSILQRTQPPYTQQPSGS | |
| HLKSYQPETNSSFQPNGTHVHGFYGQLQKFCPPHYPDSQRIVPPVSSCSVVPSFEDCLVPTSMGQASFDVFH | |
| RAFSTHSGITVYDLPSSSSSLFGESLRSGAEDATFLQISTVDRCPSQLSSVYTEG | |
| (SEQ ID NO: 22) | |
| 1 atcctttatg gttgaagggt gttggaggaa gcagagtttt catcagctgc tgaagtggca | |
| 61 actaatagag gtttgaatgg ccgtagaaaa atattgtgtt acttgtttgt tgtctagggg | |
| 121 ctcttggctt tgggcctcag tgcaagtcca ttggaaaagg cagctgcaac aatctagtgg | |
| 181 tcaccagcag tcccatgatg gttcagcgac tgggactcat ttcacctcca gcaagccagg | |
| 241 tctctacagc atgcaaccag atcagtccta gcttacagag ggcaatgaat gcagccaacc | |
| 301 tgaatatacc tccttcagat accaggtccc ttatttcgcg tgagtctttg gcgtccacga | |
| 361 ccttgagtct gacggaaagt cagtcggcct caagcatgaa gcaggagtgg tcccagggct | |
| 421 acagggccct cccttcgctc tccaaccacg gctczcagaa tggccttgat ctaggggatc | |
| 481 tccttagcct tcctcccggg acatccatgt ccagcaatag tgtctctaac tcattaccat | |
| 541 cctacctttt tggcacggaa agtagccact ctccttaccc tagtcctcgg cactcatcca | |
| 601 ccaggtccca ctcggcccgc tccaagaaga gagcgctgtc cttgtccccg ctgtccgatg | |
| 661 gcatcgggat agatttcaat accatcatcc gcacgtcgcc cacgtccttg gtggcctaca | |
| 721 tcaacgggtc gagggcttcg ccggccaacc tgtccccgca gccggaggtc tacgggcatt | |
| 781 tcctgggcgt gcgcggcagc tgcattcccc agccgcgccc ggtgcccggc agccagaagg | |
| 841 gcgtgctggt ggcccctgga ggcctggcgc tgccggccta cggcgaggac ggggccctgg | |
| 901 agcacgagcg catgcaacag ctggagcacg gcggcctgca gccaggcctg gtcaaccaca | |
| 961 tggtggtgca gcatggcctg ccgggccccg acagccagcc ggccggcctg ttcaagaccg | |
| 1021 aacgcctgga ggagttcccg ggcagcaccg tagacctacc ccccgcgcct ccgctccctc | |
| 1081 ctctgccgcc gccccaaggc cccccacccc cttaccatgc ccatgcgcac cttcaccacc | |
| 1141 cggagctcgg gccccacgcc cagcagctgg ccttgcccca ggccaccctg gacgacgacg | |
| 1201 gggagatgga cggcatcggg ggcaagcatt gctaccgctg gatcgactgc agcgccctgt | |
| 1261 acgaccagca ggaggagctc gtgcggcaca tcgagaaggt ccacatcgac cagcgcaaag | |
| 1321 gggaggactt cacttgcttc tgggccggtt gccctcgaag atacaagccc ttcaacgccc | |
| 1381 gctataaact gctgatccac atgagagtcc actctgggga gaagcccaac aagtgtacgt | |
| 1441 ttgaaggttg cgagaaggcc ttttcaaggc ttgaaaatct caagatccac ttgcggagcc | |
| 1501 acacaggcga gaagccgtat ttgtgccagc atccgggttg tcagaaggcc ttcagtaact | |
| 1561 ccagtgaccg cgccaaacac cagcggacgc atctggacac caaaccttat gcttgtcaaa | |
| 1621 ttccaggatg taccaaacgc tacacagacc caagttccct aagaaagcat gtgaaggcac | |
| 1681 attcttccaa agagcaacaa gcaaggaaaa agttgcggtc cagcacagag ctccatccag | |
| 1741 acctgctcac agattgcctc accgtgcagt ccctgcagcc ggccacttcc cctagagatg | |
| 1801 ctgctgctga agggaccgtg ggacgctccc ctggacccgg gcctgacctc tattcagctc | |
| 1861 ccattttctc cagcaattat tcaagccgaa gtggaacagc tgctggggcc gtaccacccc | |
| 1921 cacatcctgt cagtcaccct tctccaggac ataatgtaca ggggagccct cacaacccct | |
| 1981 cctcccagtt acctccactc acagctgtgg acgcaggagc tgagaggttt gcaccttctg | |
| 2041 ctccatctcc tcaccacatc agcccccgga gagttccagc tccttcttca atactgcaaa | |
| 2101 gaacacagcc tccctatacc cagcagccat caggctcaca cctgaagtcc tatcagccag | |
| 2161 aaacaaactc ttcttttcaa ccaaatggta tccatgtcca tggattttat gggcagctgc | |
| 2221 agaagttctg tcccccacac taccccgatt cccagagaat tgtgccgcct gtcagctcct | |
| 2281 gcagtgtggt gccttcgttt gaggactgcc tagtccctac atccatgggc caggccagtt | |
| 2341 ttgatgtttt ccacagagcc ttctcgactc actcgggcat tacagtgtat gatttacctt | |
| 2401 caagttcctc gagcctcttc ggggagtctc tccgcagcgg ggctgaagat gctaccttct | |
| 2461 tgcagatcag caccgtggac cgctgtccta gccagctctc ctctgtctac accgaaggct | |
| 2521 aaaagctctc ttggccactc ctgcacaccc aggaccttga tgttgcttgc caccttttgt | |
| 2581 tttcgtactc tcacagactg cttgaggaag gatgtcagcc caatcagcgg gccctgcaga | |
| 2641 gttactgatg ttctttcaga aggcaggact gaatggcaga gctagctttg caggaatcat | |
| 2701 tacagttgct cctttttctc tctggttttc ctggactatg tgaccaggag gactgtcttt | |
| 2761 tcaaagggaa tttagagcct cactctcctg gatacctgtt acttcctggc tgtcaaccct | |
| 2821 taaaggaccc cagtgaaatg atgtgcatat gaaaatgtag tttggggatg actctacctg | |
| 2881 aaaactccaa acagggaaaa agacctcaat tacgagaggc atagtgacct gcctcaccta | |
| 2941 atcctcaccc ttgctgctcc tgatgcaaaa ccaggcacaa caagggaaat ccatgtccaa | |
| 3001 agcatagtgt ggtctcaact cttagaaact ccctgggttt cccttttctc ttagccacat | |
| 3061 gctaaccagt tgcttctcag tgtttctctt caatagaaaa ataaggtttt atatgccaaa | |
| 3121 aaaaaaaaaa aaa | |

[0071] An amino acid sequence for the protein (Zinc finger protein GLI2 also known as GLI family zinc finger 2) encoded by the GLI2 gene that is a regulator of T cell exhaustion/dysfunction resistance is available from the UniPROT database at accession no. P10070 or accession number NP_005261, NP_001358200, NP_001361282, or NP_001361283, cDNA NM_005270, NM_030379, NM 030380, NM_030381, or NM_001371271 with gene location at Chr 2: 120.74-120.99 Mb.

```
(SEQ ID NO: 23)
METSASATASEKQEAKSGILEAAGFPDPGKKASPLVVAAAAAAA
VAAQGVPQHLLPPFHAPLPIDMRHQEGRYHYEPHSVHGVHGPPALSGSPVISDISLIR
LSPHPAGPGESPENAPHPYVNPHMEHYLRSVHSSPTLSMISAARGLSPADVAQEHLKE
RGLFGLPAPGTTPSDYYHQMTLVAGHPAPYGDLLMQSGGAASAPHLHDYLNPVDVSRF
SSPRVTPRLSRKRALSISPLSDASLDLQRMIRTSPNSLVAYINNSRSSSAASGSYGHL
SAGALSPAFTEPHPINPVAYQQILSQQRGLGSAFGHTPPLIQPSPTFLAQQPMALTSI
NATPTQLSSSSNCLSDTNQNKQSSESAVSSTVNPVAIHKRSKVKTEPEGLRPASPLAL
TQGQVSGHGSCGCALPLSQEQLADLKEDLDRDDCKQEAEVVIYETNCHWEDCTKEYDT
QEQLVHHINNEHIHGEKKEFVCRWQACTREQKPFKAQYMLVVHMRRHTGEKPHKCTFE
GCSKAYSRLENLKTHLRSHTGEKPYVCEHEGCNKAFSNASDRAKHQNRTHSNEKPYIC
KIPGCTKRYTDPSSLRKHVKTVHGPDAHVTKKQRNDVHLRTPLLKENGDSEAGTEPGG
PESTEASSTSQAVEDCLHVRAIKTESSGLCQSSPGAQSSCSSEPSPLGSAPNNDSGVE
MPGTGPGSLGDLTALDDTPPGADTSALAAPSAGGLQLRKHMTTMHRFEQLKKEKLKSL
KDSCSWAGPTPHTRNTKLPPLPGSGSILENESGSGGGGPAGLLPNPRLSELSASEVTM
LSQLQERRDSSTSTVSSAYTVSRRSSGISPYFSSRRSSEASPLGAGRPHNASSADSYD
PISTDASRRSSEASQCSGGSGLLNLTPAQQYSLRAKYAAATGGPPPTPLPGLERMSLR
TRLALLDAPERTLPAGCPRPLGPRRGSDGPTYGHGHAGAAPAFPHEAPGGGARRASDP
VRRPDALSLPRVQRFHSTHNVNPGPLPPCADRRGLRLQSHPSTDGGLARGAYSPRPPS
ISENVAMEAVAAGVDGAGPEADLGLPEDDLVLPDDVVQYIKAHASGALDEGTGQVYPT
ESTGFSDNPRLPSPGLHGQRRMVAADSNVGPSAPMLGGCQLGFGAPSSLNKNNMPVQW
NEVSSGTVDALASQVKPPPFPQGNLAVVQQKPAFGQYPGYSPQGLQASPGGLDSTQPH
LQPRSGAPSQGIPRVNYMQQLRQPVAGSQC2GMTTTMSPHACYGQVHPQLSPSTISGA
LNQFPQSCSNMPAKPGHLGHPQQTEVAPDPTTMGNRHRELGVPDSALAGVPPPHPVQS
YPQQSHHLAASMSQEGYHQVPSLLPARQPGEMEPQTGPMGVATAGFGLVQPRPPLEPS
PTGRHRGVRAVQQQLAYARATGHAMAAMPSSQETAEAVPKGAMGNMGSVPPQPPPQDA
GGAPDHSMLYYYGQIHMYEQDGGLENLGSCQVMRSQPPQPQACQDSIQPQPLPSPGVN
QVSSTVDSQLLEAPQIDEDAIMDDGDHSSLESGALSPSLLHSLSQNSSRLTTPRNSLT
LPSIPAGISNMAVGDMSSMLTSLAEESKELNMMT
  (SEQ ID NO: 24)
      1 gctgatggat tgcagaagtg ccggcgcttg ccagccgagg cagcacggct ccgcggactt
    61 tttttcaaac tcccatcaat gagacttcga ggaggagcgg gcggcggcgg cggctgcgac
  121 tgcgaacgcg gaggaaggcc aggagccgca ggaggagccg gaggaaagag cttgggccgc
  181 gcggcgcgcc gcagcctcgg ggagccgcct gctcgccggc ggtaggggct gcgcggcgcc
  241 cgcccgcctc taggtccccz ctcttgcctg gcccgccccg ccccggctgg ctggagcccc
  301 ggcacaaggc agccagccga gggtcgccgc gccagccaag gtgggatggg ggcccacagc
  361 caccgcccgg cgcccgagag gccacctgcg tgctagaggc aaacttttgt ctctctcgga
  421 ttgccaccca ggacgatgag cggctgagat ggagacgtct gcctcagcca ctgcctccga
  481 gaagcaagaa gccaaaagtg ggatcctgga ggccgctggc ttccccgacc cgggtaaaaa
  541 ggcctctcct ttggtggtgg ctgcagcggc agcagcagcg gtagctgccc aaggagtgcc
  601 gcagcatctc ttgccaccat tccatgcgcc cctaccgatt gacatgcgac accaggaagg
  661 aaggtaccat tacgagcctc attctgtcca cggtgtgcac gggccccctg ccctcagcgg
  721 cagccctgtc atctctgaca tctccttgat ccggctttcc ccgcacccgg ctggccctgg
  781 ggagtccccc ttcaacgccc cccacccgta cgtgaacccc cacatggagc actacctccg
  841 ttctgtgcac agcagcccca cgctctccat gatctctgca gccaggggcc tcagccccgc
  901 tgatgtggcc caggagcacc ttaaggagag gggactgttt ggccttcctg ctccaggcac
  961 caccccctca gactattacc accagatgac cctcgtggca ggccaccccg cgccctacgg
1021 ggacctgctg atgcagagcg ggggcgctgc cagcgcaccc catctccacg actacctcaa
1081 ccccgtggac gtgtcccgtt tctccagccc gggggtgacg ccccgcctga gccgraagcg
1141 ggcgctgtcc atctccccac tctcagacgc cagcctggac ctgcagcgga tgatccgcac
1201 ctcacccaac tcgctagtgg cctacatcaa caactcccga agcagctcgg cggccagcgg
1261 ttcctacggg catctgtcag cgggtgccct cagcccagcc ttcaccttcc cccaccccat
1321 caaccccgtg gcctaccagc agattctgag ccagcagagg ggtctggggt cagcctttgg
1381 acacacacca cccctgatcc agccctcacc caccttcctg gcccagcagc ccatggccct
1441 cacctccatc aatgccacgc ccacccagct cagcagcagc agcaactgtc tgagtgacac
1501 caaccagaac aagcagagca gtgagtcggc cgtcagcagc accgtcaacc ctgtcgccat
1561 tcacaagcgc agcaaggtca agaccgagcc tgagggcctg cggccggcct cccctctggc
1621 gctgacgcag ggccaggtgt ctggacacgg ctcatgtggg tgtgcccttc ccctctccca
1681 ggagcagctg gctgacctca aggaagatct ggacagggat gactgtaagc aggaggctga
1741 ggtggtcatc tatgagacca actgccactg ggaagactgc accaaggagt acgacaccca
1801 ggagcagctg gtgcatcaca tcaacaacga gcacatccac ggggagaaga aggagtttgt
1861 gtgccgctgg caggcctgca cgcgggagca gaagcccttc aaggcgcagt acatgctggt
1921 ggtgcacatg cggcgacaca cgggcgagaa gccccacaag tgcacgttcg agggctgctc
1981 gaaggcctac tcccgcctgg agaacctgaa gacacacctg cggtcccaca ccggggagaa
2041 gccatatgtg tgtgagcacg agggctgcaa caaagccttc tccaacgcct cggaccgcgc
2101 caagcaccag aatcgcaccc actccaacga gaaaccctac atctgcaaga tcccaggctg
2161 caccaagaga tacacagacc ccagctctct ccggaagcat gtgaaaacgg tccacggccc
2221 agatgcccac gtcaccaaga agcagcgcaa tgacgtgcac ctccgcacac cgctgctcaa
2281 agagaatggg gacagtgagg ccggcacgga gcctggcggc ccagagagca ccgaggccag
2341 cagcaccagc caggccgtgg aggactgcct gcacgtcaga gccatcaaga ccgagagctc
2401 cgggctgtgt cagtccagcc ccggggccca gtcgtcctgc agcagcgagc cctctcctct
2461 gggcagtgcc cccaacaatg acagtggcgt ggagatgccg gggacggggc ccgggagcct
2521 gggagacctg acggcactgg atgacacacc cccaggggcc gacacctcag ccctggctgc
2581 cccctccgct ggtggcctcc agctgcgcaa acacatgacc accatgcacc ggttcgagca
2641 gctcaagaag gagaagctca agtcactcaa ggattcctgc tcatgggccg ggccgactcc
2701 acacacgcgg aacaccaagc tgcctcccct cccgggaagt ggctccatcc tggaaaactt
2761 cagtggcagt gggggcggcg ggcccgcggg gctgctgccg aacccgcggc tgtcggagct
2821 gtccgcgagc gaggtgacca tgctgagcca gctgcaggag cgccgcgaca gctccaccag
2881 cacggtcagc tcggcctaca ccgtgagccg ccgctcctcc ggcatctccc cctacttctc
2941 cagccgccgc tccagcgagg cctcgcccct gggcgccggc cgcccgcaca acgcgagctc
3001 cgctgactcc tacgacccca tctccacgga cgcgtcgcgg cgctcgagcg aggccagcca
3061 gtgcagcggc ggctccgggc tgctcaacct cacgccggcg cagcagtaca gcctgcgggc
3121 caagtacgcg gcagccactg gcggcccccc gcccactccg ctgccgggcc tggagcgcat
3181 gagcctgcgg accaggctgg cgctgctgga cgcgcccgag cgcacgctgc ccgccggctg
3241 cccacgccca ctggggccgc ggcgtggcag cgacgggccg acctatggcc acggccacgc
3301 gggggctgcg cccgccttcc cccacgaggc tccaggcggc ggagccaggc gggccagcga
3361 ccctgtgcgg cggcccgatg ccctgtccct gccgcgggtg cagcgcttcc acagcaccca
3421 caacgtgaac cccggcccgc tgccgccctg tgccgacagg cgaggcctcc gcctgcagag
3481 ccacccgagc accgacggcg gcctggcccg cggcgcctac tcgccccggc cgcctagcat
3541 cagcgagaac gtggcgatgg aggccgtggc ggcaggagtg gacggcgcgg ggcccgaggc
3601 cgacctgggg ctgccggagg acgacctggt gcttccagac gacgtggtgc agtacatcaa
3661 ggcgcacgcc agtggcgctc tggacgaggg caccgggcag gtgtatccca cggaaagcac
3721 tggcttctct gacaacccca gactacccag cccggggctg cacggccagc gcaggatggt
3781 ggctgcggac tccaacgtgg gcccctccgc ccctatgctg ggaggatgcc agttaggctt
3841 tggggcgccc tccagcctga acaaaaataa catgcctgtg cagtggaatg aggtgagctc
3901 cggcaccgta gacgccctgg ccagccaggt gaagcctcca ccctttcctc agggcaacct
3961 ggcggtggtg cagcagaagc ctgcctttgg ccagtacccg ggctacagtc cgcaaggcct
4021 acaggctagc cctgggggcc tggacagcac gcagccacac ctgcagcccc gcagcggagc
4081 cccctcccag ggcatcccca gggtaaacta catgcagcag ctgcgacagc cagtggcagg
4141 cagccagtgt cctggcatga ctaccactat gagcccccat gcctgctatg gccaagtcca
4201 cccccagctg agccccagca ccatcagtgg ggccctcaac cagttccccc aatcctgcag
4261 caacatgcca gccaagccag ggcatctggg gcaccctcag cagacagaag tggcacctga
4321 ccccaccacg atgggcaatc gccacaggga acttggggtc cccgattcag ccctggctgg
4381 agtgccacca cctcacccag tccagagcta cccacagcag agccatcacc tggcagcctc
4441 catgagccag gagggctacc accaggtccc cagccttctg cctgcccgcc agcctggctt
4501 catggagccc caaacaggcc cgatgggggt ggctacagca ggctttggcc tagtgcagcc
4561 ccggcctccc ctcgagccca gccccactgg ccgccaccgt ggggtacgtg ctgtgcagca
4621 gcagctggcc tacgccaggg ccacaggcca tgccatggct gccatgccgt ccagtcagga
4681 aacagcagag gctgtgccca agggagcgat gggcaacatg gggtcggtgc ctccccagcc
4741 gcctccgcag gacgcaggtg gggccccgga ccacagcatg ctctactact acggccagat
4801 ccacatgtac gaacaggatg gaggcctgga gaacctcggg agctgccagg tcatgcggtc
4861 ccagccacca cagccacagg cctgtcagga cagcatccag ccccagccct tgccctcacc
4921 aggggtcaac caggtgtcca gcactgtgga ctcccagctc ctggaggccc cccagattga
1981 cttcgatgcc atcatggatg atggcgatca ctcgagtttg ttctcgggtg ctctgagccc
5041 cagcctcctc cacagcctct cccagaactc ctcccgcctc accacccccc gaaactcctt
5101 gaccctgccc tccatccccg caggcatcag caacatggct gtcggggaca tgagctccat
5161 gctcaccagc ctcgccgagg agagcaagtt cctgaacatg atgacctaga ggcccgagcg
5221 cctggtgctg agtgcacccg gaggggtcat cgctgcccag agcctgggga ttccagctgt
5281 cttgtctttt tccaaaaaag tgttaaatag gcttgagggg ttgttgcgca atggccgctt
5341 cagatgacag atgttgtaag agaaggttta tgggcatcct ctctggtctt ttggattatt
5401 cctcagaaca atgaaaaaag tctccatagg acaggaagga atgcaaaact catttacaca
5461 gtgctttcca gcctttggtg cttacaggac cgcgctgttc cggcttcttc acggctgaca
5521 ttcggctaac gagggattac tttggccaaa acctttcaaa ggatatgcag aaagatggta
5581 gggagcattt gggtttgaat ctgaatgcta tactggatac tctgctccgg aaagatgagc
5641 tttttattct actacttgga aggaaaagga attcctggtc cacctgaatt cctctatgaa
5701 gcctaactct tgaggtctct aacatacctt gtcatagagg aaaagcacag attatacctg
5761 gatgattcag gagcacattc tgattccagg tttggtagag ctggctcttc tactccgtaa
5821 agccgagtct gggactggca gcccatccaa gtgtatatga atgaataaag catccaagta
5881 tatatgaatg aataaagtat gtaagtatca ccagaaaaag gaaagaaaaa atgtactcct
5941 tggggcaagc ccagaagctg ccctggcctc tccagaccgt gtttacagtg tttgcatgta
6001 gaatgtagcc cttcctgaaa agaagacttg tttctaaata cctcggggct gctggagccg
6061 ctgtgggtta gggatggact gaggcctcga ggagtgaggg tgcacccggg gcccagcctc
6121 aggctgccct agggatctct cagtaggaag aggaagttgc gtgtttaccc aatcctgttt
6181 ctccaatgca acgtccaccc actttaccac caaaaactcc agggcctgac ggcagcccgg
6241 tcccccagca ctcaccagca gcccagtgtt ctccaccaag ccacagtgtg catgcctggt
6301 atcctccgga ttcccttcct tctgcccgct gagtcactgg gcagagaatg atgacatgtg
6361 taggtggtgt ggttgggggt ggaaagggga aggggttgat cctcaggact ctgagggagc
6421 atcgttgaat tttcctgttc agtgtgacca agacccacct ggaaatggaa tttggaactg
6481 gcttcaggag acatcattcc tgaacacact gtagggtgaa ttggtgcatc ttccccacca
6541 tacacacaca cacacacaca cacacacaca cacacacaca cacaccccaa accttttcat
6601 ggggaatgtg tggcaacctt gccaaacagc accactcaga gtgtgactct gactgtgacc
6661 ttggccttaa tgaggaactc cttaggagag tttgaggaca aggccaacat cgtcatctgg
6721 gctcgctgcg tcccagcaca tcaaactctg tccagagaca aggccaactg caaatgaaag
6781 ccagggaaca ttgctaaggg tctgtggctc tgtggtggtg ttcatcgcct tcctgagata
6841 ggatttccct tgccagtccc aacctgtata tattctgtac agaagacatc cctgaatata
6901 ctgtaggtga gtcgtccagc caaatttata tctccaaaac atttttagct ttttctacat
6961 gctatgaatt gagatgacat gctcaacttg taaataagtc tttttgtaca ttaaaaaagt
/021 aattttttca taatttatct tgtctatctg cttccccctt gacagtagtt aatgagaacc
7081 tgggcagtaa atttggtgca ttcgagcaga aattaggctg tattttttct taacagtgtc
7141 aaaattgact atcccgcctt tgccaagaaa tgtttaatgc tgaggca
```

[0072] An amino acid sequence for the protein (Interferon regulatory factor 4 (IRF4) also known as MUM1) encoded by the IRF4 gene that is a regulator of T cell exhaustion/dysfunction resistance is available from the UniPROT database at accession no. Q15306 or accession number NP_001182215 or NP_002451, cDNA NM_001195286 or NM_002460 with gene location at Chr 6: 0.39-0.41 Mb.

```
  (SEQ ID NO: 25)
MNLEGGGRGGEFGMSAVSCGNGKLRQWLIDQIDSGKYPGLVWEN
EEKSIFRIPWKHAGKQDYNREEDAALFKAWALFKGKFREGIDKPDPPTWKTRLRCALN
KSNDFEELVERSQLDISDPYKVYRIVPEGAKKGAKQLTLEDPQMSMSHPYTMTTPYPS
LPAQQVHNYMMPPLDRSWRDYVPDQPHPEIPYQCPMTFGPRGHHWQGPACENGCQVTG
TFYACAPPESQAPGVPTEPSIRSAEALAFSDCRLHICLYYREILVKELTTSSPEGCRI
SHGHTYDASNLDQVLFPYPEDNGQRKNIEKLLSHLERGVVLWMAPDGLYAKRLCQSRI
YWDGPLALCNDRPNKLERDQTCKLEDTQQFLSELQAFAHHGRSLPRFQVTLCFGEEFP
DPQRQRKLITAHVEPLLARQLYYFAQQNSGHFLRGYDLPEHISNPEDYHRSIRHSSIQ
E
  (SEQ ID NO: 26)
      1 agtttcaccg ctcgatcttg ggacccaccg ctgccctcag ctccgagtcc agggcgagtg
    61 cagagcagag cgggcggagg accccgggcg cgggcgcgga cggcacgcgg ggcatgaacc
  121 tggagggcgg cggccgaggc ggagagttcg gcatgagcgc ggtgagctgc ggcaacggga
  181 agctccgcca gtggctgatc gaccagatcg acagcggcaa gtaccccggg ctggtgtggg
  241 agaacgagga gaagagcatc ttccgcatcc cctggaagca cgcgggcaag caggactaca
  301 accgcgagga ggacgccgcg ctcttcaagg cttgggcact gtttaaagga aagttccgag
  361 aaggcatcga caagccggac cctcccacct ggaagacgcg cctgcggtgc gctttgaaca
  421 agagcaatga ctttgaggaa ctggttgagc ggagccagct ggacatctca gacccgtaca
  481 aagtgtacag gattgttcct gagggagcca aaaaaggagc caagcagctc accctggagg
  541 acccgcagat gtccatgagc cacccctaca ccatgacaac gccttaccct tcgctcccag
  601 cccagcaggt tcacaactac atgatgccac ccctcgaccg aagctggagg gactacgtcc
  661 cggatcagcc acacccggaa atcccgtacc aatgtcccat gacgtttgga ccccgcggcc
  721 accactggca aggcccagct tgtgaaaatg gttgccaggt gacaggaacc ttttatgctt
  781 gtgccccacc tgagtcccag gctcccggag tccccacaga gccaagcata aggtctgccg
  841 aagccttggc gttctcagac tgccggctgc acatctgcct gtactaccgg gaaatcctcg
  901 tgaaggagct gaccacgtcc agccccgagg gctgccggat ctcccatgga catacgtatg
  961 acgccagcaa cctggaccag gtcctgttcc cctacccaga ggacaatggc cagaggaaaa
1021 acattgagaa gctgctgagc cacctggaga ggggcgtggt cctctggatg gcccccgacg
1081 ggctctatgc gaaaagactg tgccagagca ggatctactg ggacgggccc ctggcgctgt
1141 gcaacgaccg gcccaacaaa ctggagagag accagacctg caagctcttt gacacacagc
1201 agttcttgtc agagctgcaa gcgtttgctc accacggccg ctccctgcca agattccagg
1261 tgactctatg ctttggagag gagtttccag accctcagag gcaaagaaag ctcatcacag
1321 ctcacgtaga acctctgcta gccagacaac tatattattt tgctcaacaa aacagtggac
1381 atttcctgag gggctacgat ttaccagaac acatcagcaa tccagaagat taccacagat
1441 ctatccgcca ttcctctatt caagaatgaa aaatgtcaag atgagtggtt ttctttttcc
1501 tttttttttt tttttttttg atacggggat acggggtctt gctctgtctc ccaggctgga
1561 gtgcagtgac acaatctcag ctcactgtga cctccgcctc ctgggttcaa gagactctcc
1621 tgcctcagcc tccctggtag ctgggattac aggtgtgagc cactgcaccc acccaagaca
1681 agtgattttc attgtaaata tttgacttta gtgaaagcgt ccaattgact gccctcttac
1741 tgttttgagg aattcagaag tggagatttc agttcagcgg ttgaggagaa ttgcggcgag
1801 acaagcatgg aaaatcagtg acatctgatt ggcagatgag cttatttcaa aaggaagggt
1861 ggctttgcat ttcttgtgtt ctgtagactg ccatcattga thatcactgt gaaaattgac
1921 caagtgatgt gtttacattt actgaaatgc gctccttaat ttgttgtaga ttaggtcttg
1981 ctggaagaca gagaaaactt gcctttcagt attgacactg actagagtga tgactgcttg
2041 taggtatgtc tgtgccatt: ctcagggaag taagatgtaa attgaagaag cctcacacgt
2101 aaaagaaatg tattaatgta tgtaggagct gcagttcttg tggaagacac ttgctgagtg
2161 aaggaaatga atctttgact gaagccgtgc ctgtagcctt ggggaggccc atcccccacc
2221 tgccagcggt ttcctggtgt gggtccctct gccccgccct ccttcccatt ggctttctct
2281 ccttggcctt tcctggaagc cagttagtaa acttcctatt ttcttgagtc aaaaaacatg
2341 agcgctactc ttggatggga catttttgtc tgtcctacaa tctagtaatg tctaagtaat
2401 ggttaagttt tcttgtttct gcatcttttt gaccctcatt ctttagagat gctaaaattc
2461 ttcgcataaa gaagaagaaa ttaaggaaca taaatcttaa tacttgaact gttgcccttc
2521 tgtccaagta cttaactatc tgttcccttc ctctgtgcca cgctcctctg tttgtttggc
2581 tgtccagcga tcagccatgg cgacactaaa ggaggaggag ccggggactc ccaggctgga
2641 gagcactgcc aggacccacc actggaagca ggatggagct gactacggaa ctgcacactc
2701 agtgggctgt ttctgcttat ttcatctgtt ctatgcttcc tcgtgccaat tatagtttga
2761 cagggcctta aaattacttg gctttttcca aatgcttcta tttatagaat cccaaagacc
2821 tccacttgct taagtatacc tatcacttac atttttgtgg ttttgagaaa gtacagcagt
2881 agactggggc gtcacctcca ggccgtttct catactacag gatatttact attactccca
2941 ggatcagcag aagattgcgt agctctcaaa tgtgtgttcc tgcttttcta atggatattt
3001 taaattcatt caacaagcac ctagtaagtg cctgctgtat ccctacatta cacagttcag
3061 cctttatcaa gcttagtgag cagtgagcac tgaaacatta ttttttaatg tttaaaaagt
3121 ttctaatatt aaagtcagaa tattaataca attaatatta atattaacta cagaaaagac
3181 aaacagtaga gaacagcaaa aaaataaaaa ggatctcctt ttttcccagc ccaaattctc
3241 ctctctaaaa gtgtccacaa gaaggggtgt ttattcttcc aacacatttc acttttctgt
3301 aaatatacat aaacttaaaa agaaaacctc atggagtcat cttgcacaca ctttcatgca
3361 gtgctctttg tagctaacag tgaagattta cctcgttctg ctcagaggcc ttgctgtgga
3421 gctccactgc catgtaccca gtagggtttg acatttcatt agccatgcaa catggatatg
3481 tattgggcag cagactgtgt ttcgtgaact gcag gatgt atacatctta tagatgcaaa
3541 gtattttggg gtatattatc ctaagggaag ataaagatga tattaagaac tgctgtttca
3601 cggggccctt acctgtgacc ctctttgctg aagaatattt aaccccacac agcacttcaa
3661 agaagctgtc ttggaagtct gtctcaggag caccctgtct tcttaattct ccaagcggat
3721 gctccatttc aattgctttg tgacttcttc ttctttgttt ttttaaatat tatgctgctt
3781 taacagtgga gctgaatttt ctggaaaatg cttcttggct ggggccacta cctcctttcc
3841 tatctttaca tctatgtgta tgttgacttt ttaaaattct gagtgatcca gggtatgacc
3901 tagggaatga actagctatg aaatactcag ggttaggaat cctagcactt gtctcaggac
3961 tctgaaaagg aacggcttcc tcattccttg tcttgataaa gtggaattgg caaactagaa
4021 tttagtttgt actcagtgga cagtgctgtt gaagatttga ggacttgtta aagagcactg
4081 ggtcatatgg aaaaaatgta tgtgtctccc aggtgcattt cttggtttat gtcttgttct
4141 tgagattttg tatatttagg aaaacctcaa gcagtaatta atatctcctg gaacactata
4201 gagaaccaag tgaccgactc atttacaact gaaacctagg aagcccctga gtcctgagcg
4261 aaaacaggag agttagtcgc cctacagaaa acccagctag actattgggt atgaactaaa
4321 aagagactgt gccatggtga gaaaaatgta aaatcctaca gtgaaatgag cagcccttac
4381 agtattgtta ccaccaaggg caggtaggta ttagtgtttg aaaaagctgg tctttgagcg
4441 agggcataaa tacagctagc cccaggggtg gaacaactct gggagtcttg ggtactcgca
4501 cctcttggct ttgttgatgc tccgccagga aggccacttg tgtgtgcgtg tcagttactt
4561 ttttagtaac aattcagatc cagtgtaaac ttccgttcat tgctctccag tcacatgccc
4621 ccacttcccc acaggtgaaa gtttttctga aagtgttggg attggttaag gtctttattt
4681 gtattacgta tctccccaag tcctctgtgg ccagctgcat ctgtctgaat ggtgcgtgaa
4741 ggctctcaga ccttacacac cattttgtaa gttatgtttt acatgccccg tttttgagac
4801 tgatctcgat gcaggtggat ctccttgaga tcctgatagc ctgttacagg aatgaagtaa
4861 aggtcagttt ttttttgtat tgattttcac agctttgagg aacatgcata agaaatgtag
4921 ctgaagtaga ggggacgtga gagaagggcc aggccggcag gccaaccctc ctccaatgga
4981 aattcccgtg ttgcttcaaa ctgagacaga tgggacttaa caggcaatgg ggtccacttc
5041 cccctcttca gcatcccccg taccccactt tctgctgaaa gaactgccag caggtaggac
5101 cccagaggcc cccaaatgaa agcttgaatt tcccctactg gctctgcgtt ttgctgagat
5161 ctgtaggaaa ggatgcttca caaactgagg tagataatgc tatgctgtcg ttggtataca
5221 tcatgaattt ttatgtaaat tgctctgcaa agcaaattga tatgtttgat aaatttatgt
5281 ttttaggtaa ataaaaactt ttaaaaattt gtta
```

[0073] An amino acid sequence for the protein (Interleukin-2 receptor alpha chain (also called TAC antigen, P55 and mainly CD25)) encoded by the IL2RA gene that is a regulator of T cell exhaustion/dysfunction resistance is available from the UniPROT database at accession no. P01589 or accession number NP 000408, NP_001295171 or NP_001295172, cDNA NM_000417, NM_001308242 or NM_001308243 with gene location at Chr 10: 6.01-6.06 Mb.

```
(SEQ ID NO: 27)
MDSYLLMWGLLTFIMVPGCQAELCDDDPPEIPHATFKAMAYKEG
TMLNCECKRGERRIKSGSLYMLCTGNSSHSSWDNQCQCTSSATRNTTKQVTPQPEEQK
ERKTTEMQSPMQPVDQASLPGHCREPPPWENEATERIYHFVVGQMVYYQCVQGYRALH
RGPAESVCKMTHGKTRWTQPQLICTGEMETSQFPGEEKPQASPEGRPESETSCLVTTT
DFQIQTEMAATMETSIFTTEYQVAVAGCVFLLISVLLLSGLTWQRRQRKSRRTI
  (SEQ ID NO: 28)
      1 agtttcctgg ctgaacacgc cagcccaata cttaaagaga gcaactcctg actccgatag
    61 agactggatg gacccacaag ggtgacagcc caggcggacc gatcttccca tcccacatcc
  121 tccggcgcga tgccaaaaag aggctgacgg caactgggcc ttctgcagag aaagacctcc
  181 gcttcactgc cccggctggt cccaagggtc aggaagatgg attcatacct gctgatgtgg
  241 ggactgctca cgttcatcat ggtgcctggc tgccaggcag agctctgtga cgatgacccg
  301 ccagagatcc cacacgccac attcaaagcc atggcctaca aggaaggaac catgttgaac
  361 tgtgaatgca agagaggttt ccgcagaata aaaagcgggt cactctatat gctctgtaca
  421 ggaaactcta gccactcgtc ctgggacaac caatgtcaat gcacaagctc tgccactcgg
  481 aacacaacga aacaagtgac acctcaacct gaagaacaga aagaaaggaa aaccacagaa
  541 atgcaaagtc caatgcagcc agtggaccaa gcgagccttc caggtcactg cagggaacct
  601 ccaccatggg aaaatgaagc cacagagaga atttatcatt tcgtggtggg gcagatggtt
  661 tattatcagt gcgtccaggg atacagggct ctacacagag gtcctgctga gagcgtctgc
  721 aaaatgaccc acgggaagac aaggtggacc cagccccagc tcatatgcac aggtgaaatg
  781 gagaccagtc agtttccagg tgaagagaag cctcaggcaa gccccgaagg ccgtcctgag
  841 agtgagactt cctgcctcgt cacaacaaca gattutcaaa tacagacaga aatggctgca
  901 accatggaga cgtccatatc tacaacagag taccaggtag cagtggccgg ctgtgttttc
  961 ctgctgatca gcgtcctcct cctgagtggg ctcacctggc agcggagaca gaggaagagt
1021 agaagaacaa tctagaaaac caaaagaaca agaatttctt ggtaagaagc cgggaacaga
1081 caacagaagt catgaagccc aagtgaaatc aaaggtgcta aatggtcgcc caggagacat
1141 ccgttgtgct tgcctgcgtt ttggaagctc tgaagtcaca tcacaggaca cggggcagtg
1201 gcaaccttgt ctctatgcca gctcagtccc atcagagagc gagcgctacc cacttctaaa
1261 tagcaatttc gccgttgaag aggaagggca aaaccactag aactctccat cttattttca
1321 tgtatatgtg ttcattaaag catgaatggt atggaactct ctccacccta tatgtagtat
1381 aaagaaaagt aggtttacat tcatctcatt ccaacttccc agttcaggag tcccaaggaa
1441 agccccagca ctaacgtaaa tacacaacac acacactcta ccctatacaa ctggacattg
1501 tctgcgtggt tcctttctca gccgcttctg actgctgatt ctcccgttca cgttgcctaa
1561 taaacatcct tcaagaactc tgggctgcta cccagaaatc attttaccct tggctcaatc
1621 ctctaagcta acccccttct actgagcctt cagtcttgaa tttctaaaaa acagaggcca
1681 tggcagaata atctttgggt aacttcaaaa cggggcagcc aaacccatga ggcaatgtca
1741 ggaacagaag gatgaatgag gtcccaggca gagaatcata cttagcaaag ttttacctgt
1801 gcgttactaa ttggcctctt taagagttag ttttttggg attgctatga atgataccct
1861 gaatttggcc tgcactaatt tgatctttac aggggacac acaaggtgca aatcaatgcg
1921 tacgtttcct gagaagtgtc taaaaacacc aaaaagggat ccgtacattc aatgtttatg
1981 caaggaagga aagaaagaag gaagtgaaga gggagaaggg atggaggtca cactggtaga
2041 acgtaaccac ggaaaagagc gcatcaggcc tggcacggtg gctcaggcct ataaccccag
2101 ctccctagga gaccaaggcg ggagcatctc ttgaggccag gagtttgaga ccagcctggg
2161 cagcatagca agacacatcc ctacaaaaaa ttagaaattg gctggatgtg gtggcatacg
2221 cctgtagtcc tagccactca ggaggctgag gcaggaggat tgcttgagcc caggagttcg
2281 aggctgcagt cagtcatgat ggcaccactg cactccagcc tgggcaacag agcaagatcc
2341 tgtctttaag gaaaaaaaga caagatgagc ataccagcag tccttgaaca ttatcaaaaa
2401 gttcagcata ttagaatcac cgggaggcct tgttaaaaga gttcgctggg cccatcttca
2461 gagtctctga gttgttggtc tggaatagag ccaaatgttt tgtgtgtcta acaattccca
2521 ggtgctgttg ctgctgctac tattccagga acacactttg agaaccattg tgttattgct
2581 ctgcacgccc acccactctc aactcccacg aaaaaaatca acttccagag ctaagatttc
2641 ggtggaagtc ctggttccat atctggtgca agatctcccc tcacgaatca gttgagtcaa
2701 cattctagct caacaacatc acacgattaa cattaacgaa aattattcat ttgggaaact
2761 atcagccagt tttcacttct gaaggggcag gagagtgtta tgagaaatca cggcagtttt
2821 cagcagggtc cagattcaga ttaaataact attttctgtc atttctgtga ccaaccacat
2881 acaaacagac tcatctgtgc actctccccc tcccccttca ggtatatgtt ttctgagtaa
2941 agttgaaaag aatctcagac cagaaaatat agatatatat ttaaatctta cttgagtaga
3001 actgattacg acttttgggt gttgaggggt ctataagatc aaaacttttc catgataata
3061 ctaagatgtt atcgaccatt tatctgtcct tctctcaaaa gtgtatggtg gaattttcca
3121 gaagctatgt gatacgtgat gatgtcatca ctctgctgtt aacatataat aaatttattg
3181 ctattgttta taaaagaata aatgatattt tttaaaaa
```

[0074] An amino acid sequence for the protein (Src homology 2 (SH2) domain containing inositol polyphosphate 5-phosphatase 1 (SHIP1)) encoded by the INPP5D gene that is a regulator of T cell exhaustion/dysfunction resistance is available from the UniPROT database at accession no. Q92835 or accession number NP_001017915 or NP_005532, cDNA NM_001017915 or NM_005541 with gene location at Chr 2: 233.06-233.21 Mb.

```
  (SEQ ID NO: 29)
MVPCWNHGNITRSKAEELLSRTGKDGSELVRASESISRAYALCV
LYRNCVYTYRILPNEDDKFTVQASEGVSMRFFTKLDQLIEFYKKENMGLVTHLQYPVP
LEEEDTGDDPEEDTVESVVSPPELPPRNIPLTASSCEAKEVPFSNENPRATETSRPSL
SETLFQRLQSMDTSGLPEEHLKAIQDYLSTQLAQDSEFVKTGSSSLPHLKKLTTLLCK
ELYGEVIRTLPSLESLQRLFDQQLSPGLRPRPQVPGEANPINMVSKLSQLTSLLSSIE
DKVKALLHEGPESPHRPSLIPPVTFEVKAESLGIPQKMQLKVDVESGKLIIKKSKDGS
EDKFYSHKKILQLIKSQKFLNKLVILVETEKEKILRKEYVFADSKKREGFCQLLQQMK
NKHSEQPEPDMITIFIGTWNMGNAPPPKKITSWFLSKGQGKTRDDSADYIPHDIYVIG
TQEDPLSEKEWLEILKHSLQEITSVTFKTVAIHTLWNIRIVVLAKPEHENRISHICTD
NVKTGIANTLGNKGAVGVSFMENGTSLGFVNSHLTSGSEKKLRRNQNYMNILRFLALG
DKKLSPFNITHRFTHLFWFGDLNYRVDLPTWEAETIIQKIKQQQYADLLSHDQLLTER
REQKVFLHFEEEEITFAPTYRFERLTRDKYAYTKQKATGMKYNLPSWCDRVLWKSYPL
VHVVCQSYGSTSDIMTSDHSPVFATFEAGVTSQFVSKNGPGTVDSQGQIEFLRCYATL
KTKSQTKFYLEFHSSCLESFVKSQEGENEEGSEGELVVKFGETLPKLKPIISDPEYLL
DQHILISIKSSDSDESYGEGCIALRLEATETQLPIYTPLTHHGELTGHFQGEIKLQTS
QGKTREKLYDFVKTERDESSGPKTLKSLTSHDPMKQWEVTSRAPPCSGSSITEIINPN
YMGVGPFGPPMPLHVKQTLSPDQQPTAWSYDQPPKDSPLGPCRGESPPTPPGQPPISP
KKFLPSTANRGLPPRTQESRPSDLGKNAGDTLPQEDLPLTKPEMFENPLYGSLSSFPK
PAPRKDQESPKMPRKEPPPCPEPGILSPSIVLTKAQEADRGEGPGKQVPAPRLRSFTC
SSSAEGRAAGGDKSQGKPKTPVSSQAPVPAKRPIKPSRSEINQQTPPTPTPRPPLPVK
SPAVLHLQHSKGRDYRDNTELPHHGKHRPEEGPPGPLGRTAMQ
  (SEQ ID NO: 30)
      1 agttaagctg gtggcagcag ccgaggccac caagaggcaa cgggcggcag gctgcagtgg
    61 aggggcctcc gctcccctcg gtggtgtgtg ggtcctgggg gtgcctgccg gcccggccga
  121 ggaggcccac gcccaccatg gtcccctgct ggaaccatgg caacatcacc cgctccaagg
  181 cggaggagct gctttccagg acaggcaagg acgggagctt cctcgtgcgt gccagcgagt
  241 ccatctcccg ggcatacgcg ctctgcgtgc tgtatcggaa ttgcgtttac acttacagaa
  301 ttctgcccaa tgaagatgat aaattcactg ttcaggcatc cgaaggcgtc tccatgaggt
  361 tcttcaccaa gctggaccag ctcatcgagt tttacaagaa ggaaaacatg gggctggtga
  421 cccatctgca ataccctgtg ccgctggagg aagaggacac aggcgacgac cctgaggagg
  481 acacagtaga aagtgtcgtg tctccacccg agctgccccc aagaaacatc ccgctgactg
  541 ccagctcctg tgaggccaag gaggttcctt tttcaaacga gaatccccga gcgaccgaga
  601 ccagccggcc gagcctctcc gagacattgt tccagcgact gcaaagcatg gacaccagtg
  661 ggcttccaga agagcatctt aaggccatcc aagattattt aagcactcag ctcgcccagg
  721 actctgaatt tgtgaagaca gggtccagca gtcttcctca cctgaagaaa ctgaccacac
  781 tgctctgcaa ggagctctat ggagaagtca tccggaccct cccatccctg gagtctctgc
  841 agaggttatt tgaccagcag ctctccccgg gcctccgtcc acgtcctcag gttcctggtg
  901 aggccaatcc catcaacatg gtgtccaagc tcagccaact gacaagcctg ttgtcgtcca
  961 ttgaagacaa ggtcaaggcc ttgctgcacg agggtcctga gtctccgcac cggccctccc
1021 ttatccctcc agtcaccttt gaggtgaagg cagagtctct ggggattcct cagaaaatgc
1081 agctcaaagt cgacgttgag tctgggaaac tgatcattaa gaagtccaag gatggttctg
1141 aggacaagtt ctacagccac aagaaaatcc tgcagctcat taagtcacag aaatttctga
1201 ataagttggt gatcttggtg gaaacagaga aggagaagat cctgcggaag gaatatgttt
1261 ttgctgactc caaaaagaga gaaggcttct gccagctcct gcagcagatg aagaacaagc
1321 actcagagca gccggagccc gacatgatca ccatcttcat cggcacctgg aacatgggta
1381 acgccccccc tcccaagaag atcacgtcct ggtttctctc caaggggcag ggaaagacgc
1441 gggacgactc tgcggactac atcccccatg acatttacgt gatcggcacc caagaggacc
1501 ccctgagtga gaaggagtgg ctggagatcc tcaaacactc cctgcaagaa atcaccagtg
1561 tgacttttaa aacagtcgcc atccacacgc tctggaacat ccgcatcgtg gtgctggcca
1621 agcctgagca cgagaaccgg atcagccaca tctgtactga caacgtgaag acaggcattg
1681 caaacacact ggggaacaag ggagccgtgg gggtgtcgtt catgttcaat ggaacctcct
1741 tagggttcgt caacagccac ttgacttcag gaag gaaaa gaaactcagg cgaaaccaaa
1801 actatatgaa cattctccgg ttcctggccc tgggcgacaa gaagctgagt ccctttaaca
1861 tcactcaccg cttcacgcac ctcttctggt ttggggatct taactaccgt gtggatctgc
1921 ctacctggga ggcagaaacc atcatccaga aaatcaagca gcagcagtac gcagacctcc
1981 tgtcccacga ccagctgctc acagagagga gggagcagaa ggtcttccta cacttcgagg
2041 aggaagaaat cacgtttgcc ccaacctacc gttttgagag actgactcgg gacaaatacg
2101 cctacaccaa gcagaaagcg acagggatga agtacaactt gccttcctgg tgtgaccgag
2161 tcctctggaa gtcttatccc ctggtgcacg tggtgtgtca gtcttatggc agtaccagcg
2221 acatcatgac gagtgaccac agccctgtct ttgccacatt tgaggcagga gtcacttccc
2281 agtttgtctc caagaacggc cccgggactg ttgacagcca aggacagatt gagtttctca
2341 ggtgctatgc cacattgaag accaagtccc agaccaaatt ctacctggag ttccactcga
2401 gctgcttgga gagttttgtc aagagtcagg aaggagaaaa tgaagaagga agtgaggggg
2461 agctggtggt gaagtttggt gagactcttc caaagctgaa gcccattatc tctgaccctg
2521 agtacctgct agaccagcac atcctcatca gcatcaagtc ctctgacagc gacgaatcct
2581 atggcgaggg ctgcattgcc cttcggttag aggccacaga aacgcagctg cccatctaca
2641 cgcctctcac ccaccatggg gagttgacag gccacttcca gggggagatc aagctgcaga
2701 cctctcaggg caagacgagg gagaagctct atgactttgt gaagacggag cgtgatgaat
2761 ccagtgggcc aaagaccctg aagagcctca ccagccacga ccccatgaag cagtgggaag
2821 tcactagcag ggcccctccg tgcagtggct ccagcatcac tgaaatcatc aaccccaact
2881 acatgggagt ggggcccttt gggccaccaa tgcccctgca cgtgaagcag accttgtccc
2941 ctgaccagca gcccacagcc tggagctacg accagccgcc caaggactcc ccgctggggc
3001 cctgcagggg agaaagtccc ccgacacctc ccggccagcc gcccatatca cccaagaagt
3061 ttttaccctc aacagcaaac cggggtctcc ctcccaggac acaggagtca aggcccagtg
3121 acctggggaa gaacgcaggg gacacgctgc ctcaggagga cctgccgctg acgaagcccg
3181 agatgtttga gaaccccctg tatgggtccc tgagttcctt ccctaagcct gctcccagga
3241 aggaccagga atcccccaaa atgccgcgga aggaaccccc gccctgcccg gaacccggca
3301 tcttgtcgcc cagcatcgtg ctcaccaaag cccaggaggc tgatcgcggc gaggggcccg
3361 gcaagcaggt gcccgcgccc cggctgcgct ccttcacgtg ctcatcctct gccgagggca
3421 gggcggccgg cggggacaag agccaaggga agcccaagac cccggtcagc tcccaggccc
3481 cggtgccggc caagaggccc atcaagcctt ccagatcgga aatcaaccag cagaccccgc
3541 ccaccccgac gccgcggccg ccgctgccag tcaagagccc ggcggtgctg cacctccagc
3601 actccaaggg ccgcgactac cgcgacaaca ccgagctccc gcatcacggc aagcaccggc
3661 cggaggaggg gccaccaggg cctctaggca ggactgccat gcagtgaagc cctcagtgag
3721 ctgccactga gtcgggagcc cagaggaacg gcgtgaagcc actggaccct ctcccgggac
3781 ctcctgctgg ctcctcctgc ccagcttcct atgcaaggct ttgtgttttc aggaaagggc
3841 ctagcttctg tgtggcccac agagttcact gcctgtgaga cttagcacca agtgctgagg
3901 ctggaagaaa aacgcacacc agacgggcaa caaacagtct gggtccccag ctcgctcttg
3961 gtacttggga ccccagtgcc tcgttgaggg cgccattctg aagaaaggaa ctgcagcgcc
4021 gatttgaggg tggagatata gataataata atattaataa taataatggc cacatggatc
4081 gaacactcat gatgtgccaa gtgctgtgct aagtgcttta cgaacattcg tcatatcagg
4141 atgacctcga gagctgaggc tctagccacc taaaaccacg tgcccaaacc caccagttta
4201 aaacggtgtg tgttcggagg ggtgaaagca ttaagaagcc cagtgccctc ctggagtgag
4261 acaagggctc ggccttaagg agctgaagag tctgggtagc ttgtttaggg tacaagaagc
1321 ctgttctgtc cagcttcagt gacacaagct gctttagcta aagtcccgcg ggttccggca
4381 tggctaggct gagagcaggg atctacctgg cttctcagtt ctttggttgg aaggagcagg
4441 aaatcagctc ctattctcca gtggagagat ctggcctcag cttgggctag agatgccaag
4501 gcctgtgcca ggttccctgt gccctcctcg aggtgggcag ccatcaccag ccacagttaa
4561 gccaagcccc ccaacatgta ttccatcgtg ctggtagaag agtctttgct gttgctcccg
4621 aaagccgtgc tctccagcct ggctgccagg gagggtgggc ctcttggttc caggctcttg
4681 aaatagtgca gccttttct: cctatctctg tggccttcag ctctgcttcc ttggttatta
4741 ggagaataga tgggtgatgt ctttccttat gttgcttttt caacatagca gaattaatgt
4801 agggagctaa atccagtggt gtgtgtgaat gcagaaggga atgcacccca cattcccatg
1861 atggaagtct gcgtaaccaa taaattgtgc ctttctcact ca
```

[0075] An amino acid sequence for the protein (Interleukin-2 receptor subunit beta) encoded by the IL2RB gene that is a regulator of T cell exhaustion/dysfunction resistance is available from the UniPROT database at accession no. P14784 or accession number NP_000869, NP_001333151, or NP_001333152, cDNA NM_000878. NM_001346222 or NM_001346223 with gene location at Chr 22: 37.13-37.18 Mb.

```
  (SEQ ID NO: 31)
MAAPALSWRLPLLILLLPLATSWASAAVNGTSQFTCFYNSRANI
SCVWSQDGALQDTSCQVHAWPDRRRWNQTCELLPVSQASWACNLILGAPDSQKLTTVD
IVTLRVLCREGVRWRVMAIQDFKPFENLRLMAPISLQVVHVETHRCNISWEISQASHY
FERHLEFEARTLSPGHTWEEAPLLTLKQKQEWICLETLTPDTQYEFQVRVKPLQGEFT
TWSPWSQPLAFRTKPAALGKDTIPWLGHLLVGLSGAFGFIILVYLLINCRNTGPWLKK
VLKCNTPDPSKFFSQLSSEHGGDVQKWLSSPFPSSSFSPGGLAPEISPLEVLERDKVT
QLLLQQDKVPEPASLSSNHSLTSCFTNQGYFFFHLPDALEIEACQVYFTYDPYSEEDP
DEGVAGAPTGSSPQPLQPLSGEDDAYCTFPSRDDLLLFSPSLLGGPSPPSTAPGGSGA
GEERMPPSLQERVPRDWDPQPLGPPTPGVPDLVDFQPPPELVLREAGEEVPDAGPREG
VSFPWSRPPGQGEFRALNARLPLNTDAYLSLQELQGQDPTHLV
  (SEQ ID NO: 32)
      1 agagctcagc agggccctgg agagatggcc acggtcccag caccggggag gactggagag
    61 cgcgcgctgc caccgcccca tgtctcagcc agggcttcct tcctcggctc caccctgtgg
  121 atgtaatggc ggcccctgct ctgtcctggc gtctgcccct cctcatcctc ctcctgcccc
  181 tggctacctc ttgggcatch gcagcggtga atggcacttc ccagttcaca tgcttctaca
  241 actcgagagc caacatctcc tgtgtctgga gccaagatgg ggctctgcag gacacttcct
  301 gccaagtcca tgcctggccg gacagacggc ggtggaacca aacctgtgag ctgctccccg
  361 tgagtcaagc atcctgggcc tgcaacctga tcctcggagc cccagattct cagaaactga
  421 ccacagttga catcgtcacc ctgagggtgc tgtgccgtga gggggtgcga tggagggtga
  481 tggccatcca ggacttcaag ccctttgaga accttcgcct gatggccccc atctccctcc
  541 aagttgtcca cgtggagacc cacagatgca acataagctg ggaaatctcc caagcctccc
  601 actactttga aagacacctg gagttcgagg cccggacgct gtccccaggc cacacctggg
  661 aggaggcccc cctgctgact ctcaagcaga agcaggaatg gatctgcctg gagacgctca
  721 ccccagacac ccagtatgag tttcaggtgc gggtcaagcc tctgcaaggc gagttcacga
  781 cctggagccc ctggagccag cccctggcct tcaggacaaa gcctgcagcc cttgggaagg
  841 acaccattcc gtggctcggc cacctcctcg tgggcctcag cggggctttt ggcttcatca
  901 tcttagtgta cttgctgatc aactgcagga acaccgggcc atggctgaag aaggtcctga
  961 agtgtaacac cccagacccc tcgaagttct tttcccagct gagctcagag catggaggag
1021 acgtccagaa gtggctctct tcgcccttcc cctcatcgtc cttcagccct ggcggcctgg
1081 cacctgagat ctcgccacta gaagtgctgg agagggacaa ggtgacgcag ctgctcctgc
1141 agcaggacaa ggtgcctgag cccgcatcct taagcagcaa ccactcgctg accagctgct
1201 tcaccaacca gggttacttc ttcttccacc tcccggatgc cttggagata gaggcctgcc
1261 aggtgtactt tacttacgac ccctactcag aggaagaccc tgatgagggt gtggccgggg
1321 cacccacagg gtcttccccc caacccctgc agcctctgtc aggggaggac gacgcctact
1381 gcaccttccc ctccagggat gacctgctgc tcttctcccc cagtctcctc ggtggcccca
1441 gccccccaag cactgcccct gggggcagtg gggccggtga agagaggatg cccccttctt
1501 tccaagaaag agtccccaga gactgggacc cccagcccct ggggcctccc accccaggag
1561 tcccagacct ggtggatttt cagccacccc ctgagctggt gctgcgagag gctggggagg
1621 aggtccctga cgctggcccc agggagggag tcagcttccc ctggtccagg cctcctgggc
1681 agggggagtt cagggccctt aatgctcgcc tgcccctgaa cactgatgcc tacttgtccc
1741 tccaagaact ccagggtcag gacccaactc acttggtgta gacagatggc cagggtggga
1801 ggcaggcagc tgcctgctcz gcgccgagcc tcagaaggac cctgttgagg gtcctcagtc
1861 cactgctgag gacactcagt gtccagttgc agctggactt ctccacccgg atggccccca
1921 cccagtcctg cacacttggt ccatccattt ccaaacctcc actgctgctc ccgggtcctg
1981 ctgcccgagc caggaactgt gtgtgttgca ggggggcagt aactccccaa ctccctcgtt
2041 aatcacagga tcccacgaat ttaggctcag aagcatcgct cctctccagc cctgcagcta
2101 ttcaccaata tcagtcctcg cggctctcca gggctccctg ccctgacctc ttccctgggt
2161 tttctgcccc agcctcctcc ttccctcccc tccccgtcca cagggcagcc tgagcgtgct
2221 ttccaaaacc caaatatggc cacgctcccc ctcggttcaa aaccttgcac aggtcccact
2281 gccctcagcc ccacttctca gcctggtact tgtacctccg gtgtcgtgtg gggacatccc
2341 cttctgcaat cctccctacc gtcctcctga gccactcaga gctccctcac accccctctg
2401 ttgcacatgc tattccctgg ggctgctgtg cgctccccct catctaggtg acaaacttcc
2461 ctgactcttc aagtgccggt tttgcttctc ctggagggaa gcactgcctc ccttaatctg
2521 ccagaaactt ctagcgtcag tgctggaggg agaagctgtc agggacccag ggcgcctgga
2581 gaaagaggcc ctgttacta: tcctttggga tctctgaggc ctcagagtgc ttggctgctg
2641 tatctttaat gctggggccc aagtaagggc acagatcccc ccacaaagtg gatgcctgct
2701 gcatcttccc acagtggctt cacagaccca caagagaagc tgatggggag taaaccctgg
2761 agtccgaggc ccaggcagca gccccgccta gtgg gggcc ctgatgctgc caggcctggg
2821 acctcccact gccccctcca ctggaggggt ctcctctgca gctcagggac tggcacactg
2881 gcctccagaa gggcagctcc acagggcagg gcctcattat ttttcactgc cccagacaca
2941 gtgcccaaca ccccgtcgta taccctggat gaacgaatta attacctggc accacctcgt
3001 ctgggctccc tgcgcctgac attcacacag agaggcagag tcccgtgccc attaggtctg
3061 gcatgccccc tcctgcaagg ggctcaaccc cctaccccga cccctccacg tatctttcct
3121 aggcagatca cgttgcaatg gctcaaacaa cattccaccc cagcaggaca gtgaccccag
3181 tcccagctaa ctctgacctg ggagccctca ggcacctgca cttacaggcc ttgctcacag
3241 ctgattgggc acctgaccac acgcccccac aggctctgac cagcagccta tgagggggtt
3301 tggcaccaag ctctgtccaa tcaggtaggc tgggcctgaa ctagccaatc agatcaactc
3361 tgtcttgggc gtttgaactc agggagggag gcccttggga gcaggtgctt gtggacaagg
3421 ctccacaagc gttgagcctt ggaaaggtag acaagcgttg agccactaag cagaggacct
3481 tgggttccca atacaaaaat acctactgct gagagggctg ctgaccattt ggtcaggatt
3541 cctgttgcct ttatatccaa aataaactcc cctttcttga ggttgtctga gtcttgggtc
3601 tatgccttga aaaaagctga attattggac agtctcacct cctgccatag ggtcctgaat
3661 gtttcagacc acaaggggct ccacaccttt gctgtgtgtt ctggggcaac ctactaatcc
3721 tctctgcaag tcggtctcct tatcccccca aatggaaatt gtatttgcct tctccacttt
3781 gggaggctcc cacttcttgg gagggttaca ttttttaagt cttaatcatt tgtgacatat
3841 gtatctatac atccgtatcc tttaatgatc cgtgtgtacc atctttgtga ttatttcctt
3901 aatatttttt ctttaagtca gttcattttc gttgaaatac atttatttaa agaaaaatct
3961 ttgttactct gtaaatgaaa aaacccattt tcgccataaa taaaaggtaa ctgtacaaaa
4021 taagtacaat gcaa
```

[0076] An amino acid sequence for the protein (Inositol-trisphosphate 3-kinase A) encoded by the ITPKA gene that is a regulator of T cell exhaustion/dysfunction resistance is available from the UniPROT database at accession no. P23677 or accession number NP_002211, cDNA NM_002220 with gene location at Chr 15: 41.49-41.5 Mb.

```
  (SEQ ID NO: 33)
MTLPGGPTGMARPGGARPCSPGLERAPRRSVGELRLLFEARCAA
VAAAAAAGEPRARGAKRRGGQVPNGLPRAPPAPVIPQLTVTAEEPDVPPTSPGPPERE
RDCLPAAGSSHLQQPRRLSTSSVSSTGSSSLLEDSEDDLLSDSESRSRGNVQLEAGED
VGQKNHWQKIRTMVNLPVISPFKKRYAWVQLAGHTGSFKAAGTSGLILKRCSEPERYC
LARLMADALRGCVPAFHGVVERDGESYLQLQDLLDGFDGPCVLDCKMGVRTYLEEELT
KARERPKLRKDMYKKMLAVDPEAPTEEEHAQRAVTKPRYMQWREGISSSTTLGFRIEG
IKKADGSCSTDFKTTRSREQVLRVFEEFVQGDEEVLRRYLNRLQQIRDTLEVSEFFRR
HEVIGSSLLFVHDHCHRAGVWLIDFGKTTPLPDGQILDHRRPWEEGNREDGYLLGLDN
LIGILASLAER
  (SEQ ID NO: 34)
      1 agtccccggc gcgccgcggg ctggtgggct cagcggcggc gccggcactg ggaaatgacc
    61 ctgcccgggg gcccaacggg catggcgcgg ccggggggcg cgaggccctg cagcccgggg
  121 ctggagcggg ccccgcgccg gagtgtcggg gagctgcgcc tgctcttcga ggcgcgctgt
  181 gcggcggtcg ctgcggccgc cgccgcgggg gagccccggg cccgcggggc caagcggcgt
  241 gggggacagg tccccaacgg gcttccgcgg gctcccccgg ccccggtgat ccctcagctg
  301 accgtgacag ccgaggagcc cgacgtgccc ccgaccagcc ctgggccgcc ggagcgggag
  361 agggactgcc tcccggcagc gggctcttcg cacctgcagc agccgcgccg cctttccacc
  421 tcgtcggtct cctccactgg ctcctcgtcg ctgctcgagg actcggagga cgacctgctg
  481 agcgacagtg agagccggag ccgcggcaac gtgcagctgg aagcgggcga ggacgtgggt
  541 cagaaaaacc actggcagaa gatccggacc atggtcaatc tgccggtcat aagccctttc
  601 aagaagcgct acgcctgggt gcagctggca gggcacactg ggagttttaa ggcggcgggc
  661 accagcgggc tgatcctgaa gcgctgctcg gagccggagc gctactgcct ggcgcggctg
  721 atggctgacg cgctgcgcgg ctgcgtgcct gccttccacg gcgtggtgga gcgcgacggc
  781 gaaagctacc tgcagctgca ggacctgctc gatggcttcg acggaccttg tgtgctcgac
  841 tgcaaaatgg gcgtcaggac ttacctagag gaggagctga ccaaggcccg tgagcggccc
  901 aagctgcgga aggacatgta caagaaaatg ctggcggtgg atcctgaagc tcccacggag
  961 gaggagcacg cgcagcgcgc cgtcaccaag ccgcgctaca tgcagtggcg ggaaggcatc
1021 agctccagca ccaccctcgg cttccgcatc gagggcatca agaaagcgga cggctcctgc
1081 agcaccgact tcaagactac gcgaagccga gagcaggtgc ttcgcgtctt tgaagagttt
1141 gtgcaaggag atgaggaagt gctgaggcgg tatctgaacc gcctgcagca gatccgggac
1201 accctggagg tatccgagtt cttcaggagg cacgaggtga tcggcagctc gctcctcttt
1261 gtgcacgatc actgccatcg cgccggcgtg tggctcatcg acttcggcaa gaccacgccc
1321 ctccccgatg gccagatcct ggaccaccgg cggccctggg aggagggcaa ccgcgaggac
1381 ggctatttgc tggggctgga caatctcatt ggcatcctgg ccagcctggc tgagagatga
1441 ggctggactc ctgtccccgc gggccgctca cctgacatgt ggacctgcag ctttgtcccc
1501 actgtgcatg ccggcttgag actggagccc cgcggtgcag ggcagttcac cgggtcctgc
1561 aggaccaggt gccagccact aagggggggc accgccgatg ccaggggttt tgcccacccg
1621 ggccccagcg ttcccagagc caaatgacac taacttatag aaggggaggg ggcaaagggc
1681 ttcttcctca ggccagctct tctgaggagg ctctgccctc tccagaggtg ccagaccgcg
1741 gattttattt agcaagccca gaccttccgg tctaacgtct cacaccacga cggactcccc
1801 ttcctaataa aactcaaaga caaga
```

[0077] An amino acid sequence for the protein (Inositol-trisphosphate 3-kinase B) encoded by the ITPKB gene that is a regulator of T cell exhaustion/dysfunction resistance is available from the UniPROT database at accession no. P27987 or accession number NP_002212, cDNA NM_002221 or NM_001388404 with gene location at Chr 1: 226.63-226.74 Mb.

| (SEQ ID NO: 35) | |
|---|---|
| MAVYCYALNSLVIMNSANEMKSGGGPGPSGSETPPPPRRAVLSP | |
| GSVFSPGRGASFLFPPAESLSPEEPRSPGGWRSGRRRLNSSSGSGSGSSGSSVSSPSW | |
| AGRLRGDRQQVVAAGTLSPPGPEEAKRKLRILQRELQNVQVNQKVGMFEAHIQAQSSA | |
| IQAPRSPRLGRARSPSPCPFRSSSQPPGRVLVQGARSEERRTKSWGEQCPETSGTDSG | |
| RKGGPSLCSSQVKKGMPPLPGRAAPTGSEAQGPSAFVRMEKGIPASPRCGSPTAMEID | |
| KRGSPTPGTRSCLAPSLGLFGASLTMATEVAARVTSTGPHRPQDLALTEPSGRARELE | |
| DLQPPEALVERQGQFLGSETSPAPERGGPRDGEPPGKMGKGYLPCGMPGSGEPEVGKR | |
| PEETTVSVQSAESSDSLSWSRLPRALASVGPEEARSGAPVGGGRWQLSDRVEGGSPTL | |
| GLLGGSPSAQPGTGNVEAGIPSGRMLEPLPCWDAAKDLKEPQCPPGDRVGVQPGNSRV | |
| WQGTMEKAGLAWTRGTGVQSEGTWESQRQDSDALPSPELLPQDPDKPFLRKACSPSNI | |
| PAVIITDMGTQEDGALEETQGSPRGNLPLRKLSSSSASSTGFSSSYEDSEEDISSDPE | |
| RTLDPNSAFLHTLDQQKPRVSKSWRKIKNMVHWSPFVMSFKKKYPWIQLAGHAGSFKA | |
| AANGRILKKHCESEQRCLDRLMVDVLRPFVPAYHGDVVKDGERYNQMDDLLADFDSPC | |
| VMDCKMGIRTYLEEELTKARKKPSLRKDMYQKMIEVDPEAPTEEEKAQRAVTKPRYMQ | |
| WRETISSTATLGFRIEGIKKEDGTVNRDFKKTKTREQVTEAFREFTKGNHNILIAYRD | |
| RLKAIRTTLEVSPFFKCHEVIGSSLLFIHDKKEQAKVWMIDFGKTTPLPEGQTLQHDV | |
| PWQEGNREDGYLSGLNNLVDILTEMSQDAPLA | |
| (SEQ ID NO: 36) | |
| 1 | gggcagtatc tccacggtcg aaaagggcgt gcagggccgg cttggcgtcg ccactgccgg |
| 61 | gatcgccggg cccctgaacc gaagagcttt cccccctctt tcgcactcct cttttttgtc |
| 121 | ttccatagct tgtgagaaaa taatttctga gcatttttac ttttaaagcc atctcgtccc |
| 181 | tacgaggttt gcgcctctgg gcatgtagtc tacacaggac ctgagaatct gagaaactgc |
| 241 | agccgcacgg ttgtttatgg agctttgggc gggggctgag cccgcggtcg tgcccccagc |
| 301 | ccgctgccca ggccatgccg ccccatctgc gcgcggagcc gcggctgccg ggcctccggg |
| 361 | gctgagccgg gagcgccggg aggaggaggc gccggcggcg gagcaggagc gggagccgcg |
| 421 | gcggcgggca gcgcgggacc cagtactatg gctgtgtact gctatgcgct caatagcctg |
| 481 | gtgatcatga atagcgccaa cgagatgaag agcggcggcg gcccggggcc cagtggcagc |
| 541 | gagacgcccc cgcccccgag gagggcagtg ctgagccccg gcagcgtttt cagccccggg |
| 601 | agaggcgcct ctttcctctt ccccccagcc gagtcgctgt cccccgagga gccccggagc |
| 661 | cccgggggct ggcggagcgg ccggcgcagg ctgaatagta gcagcggcag tggcagcggc |
| 721 | agcagcggca gtagcgtgag cagcccaagt tgggctggtc gcctgcgagg ggaccggcag |
| 781 | caggtggtgg cagccggtac cctctccccg ccagggccgg aggaggccaa gaggaagctg |
| 841 | cggatcttgc agcgcgagtt gcagaacgtg caggtgaacc agaaagtggg catgtttgag |
| 901 | gcgcacatcc aggcacagag ctccgccatt caagcgcccc gcagcccgcg tttgggcagg |
| 961 | gctcgctcgc cctccccgtg ccccttccgc agcagcagtc agccccctgg aagggtcctg |
| 1021 | gttcagggcg cccggagcga ggaacggagg acaaagtcct ggggggagca atgtccagag |
| 1081 | acttcaggaa ccgactccgg gaggaaagga gggcccagcc tatgctcctc gcaggtgaag |
| 1141 | aaaggaatgc cacctcttcc cggccgggct gcccctacag gatcagaggc tcagggtcca |
| 1201 | tccgcttttg taaggatgga gaagggtatc cctgccagtc cccgctgtgg ctcacccaca |
| 1261 | gctatggaaa ttgacaaaag gggctctcct accccgggaa ctcggagctg cctagctccc |
| 1321 | tcattggggc tgttcggagc tagcttaacg atggccacgg aagtggcagc gagagttaca |
| 1381 | tccactgggc cacaccgtcc acaggatctt gccctcactg agccgtctgg gagagcccgt |
| 1441 | gagcttgagg acctgcagcc cccagaggcc ctggtggaga ggcaggggca gtttctgggc |
| 1501 | agtgagacaa gcccagcccc agaaaggggc gggccccgcg atggagaacc ccctgggaag |
| 1561 | atggggaaag gatatctgcc ctgtggcatg ccgggctctg gggagcctga agtgggcaaa |
| 1621 | aggccagagg agacgactgt gagcgtgcaa agcgcagagt cctctgattc cctgagctgg |
| 1681 | tccaggctgc ccagggccct ggcctccgta ggccctgagg aggcccgaag tggggccccc |
| 1741 | gtgggcgggg ggcgttggca gctctccgac agagtggagg gagggtcccc aacgctgggc |
| 1801 | ttgcttgggg gcagcccctc agcacagccg gggaccggga atgtggaggc gggaattcct |
| 1861 | tctggcagaa tgctggagcc tttgccctgt tgggacgctg cgaaagatct gaaagaacct |
| 1921 | cagtgccctc ctggggacag ggtgggtgtg cagcctggga actccagggt ttggcagggc |
| 1981 | accatggaga aagccggttt ggcttggacg cgtggcacag gggtgcaatc agaggggact |
| 2041 | tgggaaagcc agcggcagga cagtgatgcc ctcccaagtc cggagctgct accccaagat |
| 2101 | ccggacaagc ctttcctgag gaaggcctgc agccccagca acatacctgc tgtcatcatt |
| 2161 | acagacatgg gcacccagga ggatggggcc ttggaggaga cgcagggaag ccctcggggc |
| 2221 | aacctgcccc tgaggaaact gtcctcttcc tcggcctcct ccacgggctt ctcctcatcc |
| 2281 | tacgaagact cagaggagga catctccagt gaccctgagc gcaccctgga ccccaactca |
| 2341 | gccttcctgc ataccctgga ccagcagaaa cctagagtga gcaaatcatg gaggaagata |
| 2401 | aaaaacatgg tgcactggtc tcccttcgtc atgtccttca agaagaagta cccctggatc |
| 2461 | cagctggcag gacacgcagg gagtttcaag gcagctgcca atggcaggat cctgaagaag |
| 2521 | cactgtgagt cagagcagcg ctgcctggac cggctgatgg tggatgtgct gaggcccttc |
| 2581 | gtacctgcct accatgggga tgtggtgaag gacggggagc gctacaacca gatggacgac |
| 2641 | ctgctggccg acttcgactc gccctgtgtg atggactgca agatgggaat caggacctac |
| 2701 | ctggaggagg agctcacgaa ggcccggaag aagcccagcc tgcggaagga catgtaccag |
| 2761 | aagatgatcg aggtggaccc cgaggccccc accgaggagg aaaaagcaca gcgggctgtg |
| 2821 | accaagccac ggtacatgca gtggcgggag accatcagct ccacggccac cctggggttc |
| 2881 | aggatcgagg gaatcaagaa agaagacggc accgtgaacc gggacttcaa gaagaccaaa |
| 2941 | acgagggagc aggtcaccga ggccttcaga gagttcacta aaggaaacca taacatcctg |
| 3001 | atcgcctatc gggaccggct gaaggccatt cgaaccactc tagaagtttc tcccttcttc |
| 3061 | aagtgccacg aggtcattgg cagctccctc ctcttcatcc acgacaagaa ggaacaggcc |
| 3121 | aaagtgtgga tgatcgactt tcggaaaacc acgcccctgc ctgagggcca gaccctgcag |
| 3181 | catgacgtcc cctggcagga ggggaaccgg gaggatggct acctctcggg gctcaataac |
| 3241 | ctcgtcgaca tcctgaccga gatgtcccag gatgccccac tcgcctgagc tgcccacgcc |
| 3301 | ctccctggcc cccgcctggg cctcctttcc tcctcctgtg cttcctttct cgttcctaac |
| 3361 | ttttccttca cttacacctg actgaccctc ctgaactgca ctacaagaca ctttgtagaa |
| 3421 | gaggagatga gagtttctag tcattttcct aacttcaggg cttggaggtg gtgtttgcac |
| 3481 | tgctttttgt agagagggtc acctactaga agagaaatgc ccagtcttag aggtgggtca |
| 3541 | ggtgtagagc tggagggggt ccctggctgc tgaggggacc ctaccagatg agccctgcct |
| 3601 | ctgggagccc cctaggaagc accagcctgg acctaccacc tgcggaggcc tgctgccccc |
| 3661 | tggcggccag tgctgttaga gtgctgccaa gcacagcctt atttctgccg gggcctcccc |
| 3721 | accggagagc ccagggggcc ggccgggttc ctggtccctg gctgggagca gggctttctg |
| 3781 | gtagttgggg cacaaaacca tcggggaacc acatgttgac tgtgagcaaa gtgtcttccg |
| 3841 | attagcagcc tcagggatgc cctggtggcc tctccagggc tgctcaggca aggcccccca |
| 3901 | cccatctggt atggaaacct gccggctcca ggccagaccc aggagccaag agaaggctga |
| 3961 | agccagcttc gctgtgttct ctgatctagg ccttcccaga ggaggcgagc agaagctgtg |
| 4021 | ccacttggaa ttgcaaccca tgagttcaga aggcacactc tgccatgctg agctccaagg |
| 4081 | gtgctaccag gggaagatgg gatctataga gtctctgggc cctggcccca gggaggagca |
| 4141 | catttttctt gaccctcacc tacctggtgc tagttggtca accctgcctg catacatggg |
| 4201 | ctcctgtcat ggggcccaga gtcccttgca gatatagaaa taggggagga gctcaggtct |
| 4261 | gcgccaggca ggaagaaggc aggcttctgg cttccagagg tgccgcggtg gcctcctggc |
| 4321 | atcatttgtt attgcctctg aaacaagcct tactgcctgg agggcttaga ttcctgcttc |
| 4381 | tccaatgtag tgtgggtatc ttgtagggta tgtggtggat gccagggcgt gctccaggca |
| 4441 | cctcttcctg aagtctctgc atttggagat tcgtggagaa cctatttaag cccaatttta |
| 4501 | actgaaagcc agtgagtctg atatggaagg gaatgtaaaa tttgcctgac ttcttaagaa |
| 4561 | caaaaccccc agctctgtgc cccatgctcc ttggggcttg ccacccactc ctttgctgtc |
| 4621 | agaggtacag gagctgggag agtccaggag ctagggacac agagggagac tatggaccaa |
| 4681 | ggtgtgtgtg tctggaggaa ccactgccca ccccaccacc ccggggtctc tggggaactg |
| 4741 | tcaacctgcc cacgggacat gtacatttcc ccttatgtgc tggaagtgtg agtgacactt |
| 4801 | gctgggggtg gagggtggga cacatgagga tgtataagta cagattttaa aaaaggaaat |
| 4861 | caacttacac ttcctggctc ttgtttaaaa cagtggtgag ctcctgtgtg ggccgacttg |
| 4921 | ctaaaggtca cacacgcgcc cggtggagca cgagagacct cgtggcagca tgtgatctgg |
| 4981 | aaggcaggca ggacgggggc gttggggagc caaagtcaac tctgggcctc tggagctata |
| 5041 | gtgacttttg ggctagaagg gaccctggtg gtctgtgctt cagccatttg cagggcaggg |
| 5101 | gcatcattaa ttcagacgta aagattctat gaatatggac tggccaaaag ttatccttac |
| 5161 | tccatctgtg aaagaagttt gctaaagcaa atcatgatat gaacaaaaat tacaggggac |
| 5221 | ctgtttaaga gaacaaaatg ttccaagcac tttaggcaga caccagctgt ttgcaaacaa |
| 5281 | tgtgctaata tgcaaatgat gtgcttatta aaggaggccc atggggcctc ttattggcaa |
| 5341 | tacttggctg tgggttacat taaatatgtg aacatagtat gaagtagcat cattttaggg |
| 5401 | ttattctgtt acttagggtt tttgttttct gttttttttt tctctttttt tgtatttacc |
| 5461 | gtgctagttc tcttctacac ctactctgtc tctcaagcca ttttgccact cgcttccctg |
| 5521 | ccatctggcc cttccctttg tctcagtggg atagatggat tgtgaaatgg aatctcccag |
| 5581 | aacccctgcc ctggcagcct ggaagaccgt gcctgcccag ccctcgtcac cacagggact |
| 5641 | ccttgggtcc tggcagtgca tgtgccagca ggcaggacaa actctgtgta cctgtgccca |
| 5701 | ggtgaatggg cgcagggtcc tcttgccctg tcctgcgggg ggccccacga gttcctggca |
| 5761 | ttcagcactg cttagcattc tcggaaggtt tcttcaactg cttgcttttc ccaggcttgc |
| 5821 | ctttagtgtc atgtaagaca tttttaagtt atatttattt tgttgggttt taaaattgca |
| 5881 | cagaacacta agaccgaaag gctggactct tgtttctcct tgaaagcttt gcctttgttt |
| 5941 | tgaacttcct ttcccacttg gtagaaagag cccagaagca gccctggccc tgtaagatgg |
| 6001 | actctttcat ccttcagttg tatttagctt tgagcttctc tgcatctgtc caccccatgt |
| 6061 | gtatataacc cagcccctgg ctctggggtg gtcacctcgt cagtgccttt tgttctggag |
| 6121 | gagaggaccc cccccgcctg ccgagaggct ctcttcctgt tctgcacccc tctccccatg |
| 6181 | ggaccttgga gaaaactgaa ctgttacaaa cccctgcaca gtgcctgtca aacagatgca |
| 6241 | aaccttcctg aataaagcct tggagacca |

[0078] An amino acid sequence for the protein (Interleukin 10 (IL-10)), also known as human cytokine synthesis inhibitory factor (CSIF)) encoded by the IL10 gene that is a regulator of T cell exhaustion/dysfunction resistance is available from the UniPROT database at accession no. P22301 or accession number P22301. cDNA NM_000572 with gene location at Chr 1: 206.77-206.77 Mb.

| (SEQ ID NO: 37) | |
|---|---|
| MHSSALLCCLVLLTGVRASPGQGTQSENSCTHFPGNLPNMLRDL | |
| RDAFSRVKTFFQMKDQLDNLLLKESLLEDFKGYLGCQALSEMIQFYLEEVMPQAENQD | |
| PDIKAHVNSLGENLKTLRLRLRRCHRFLPCENKSKAVEQVKNAFNKLQEKGIYKAMSE | |
| FDIFINYIEAYMTMKIRN | |
| (SEQ ID NO: 38) | |
| 1 | acacatcagg ggcttgctct tgcaaaacca aaccacaaga cagacttgca aaagaaggca |
| 61 | tgcacagctc agcactgctc tgttgcctgg tcctcctgac tggggtgagg gccagcccag |
| 121 | gccagggcac ccagtctgag aacagctgca cccacttccc aggcaacctg cctaacatgc |
| 181 | ttcgagatct ccgagatgcc ttcagcagag tgaagacttt ctttcaaatg aaggatcagc |
| 241 | tggacaactt gttgttaaag gagtccttgc tggaggactt taagggttac ctgggttgcc |
| 301 | aagccttgtc tgagatgatc cagttttacc tggaggaggt gatgccccaa gctgagaacc |
| 361 | aagacccaga catcaaggcg catgtgaact ccctggggga gaacctgaag accctcaggc |
| 421 | tgaggctacg gcgctgtcat cgatttcttc cctgtgaaaa caagagcaag gccgtggagc |
| 481 | aggtgaagaa tgcctttaat aagctccaag agaaaggcat ctacaaagcc atgagtgagt |
| 541 | ttgacatctt catcaactac atagaagcct acatgacaat gaagatacga aactgagaca |
| 601 | tcagggtggc gactctatag actctaggac ataaattaga ggtctccaaa atcggatctg |
| 661 | gggctctggg atagctgacc cagccccttg agaaacctta ttgtacctct cttatagaat |
| 721 | atttattacc tctgatacct caacccccat ttctatttat ttactgagct tctctgtgaa |
| 781 | cgatttagaa agaagcccaa tattataatt tttttcaata tttattattt tcacctgttt |
| 841 | ttaagctgtt tccatagggt gacacactat ggtatttgag tgttttaaga taaattataa |
| 901 | gttacataag ggaggaaaaa aaatgttctt tggggagcca acagaagctt ccattccaag |
| 961 | cctgaccacg ctttctagct gttgagctgt tttccctgac ctccctctaa tttatcttgt |
| 1021 | ctctgggctt ggggcttcct aactgctaca aatactctta ggaagagaaa ccagggagcc |
| 1081 | cctttgatga ttaattcacc ttccagtgtc tcggagggat tcccctaacc tcattcccca |
| 1141 | accacttcat tcttgaaagc tgtggccagc ttgttattta taacaaccta aatttggttc |
| 1201 | taggccgggc gcggtggctc acgcctgtaa tcccagcact ttgggaggct gaggcgggtg |
| 1261 | gatcacttga ggtcaggagt tcctaaccag cctggtcaac atggtgaaac cccgtctcta |
| 1321 | ctaaaaatac aaaaattagc cgggcatggt ggcgcgcacc tgtaatccca gctacttggg |
| 1381 | aggctgaggc aagagaattg cttgaaccca ggagatggaa gttgcagtga gctgatatca |
| 1441 | tgcccctgta ctccagcctg ggtgacagag caagactctg tctcaaaaaa taaaaataaa |
| 1501 | aataaatttg gttctaatag aactcagttt taactagaat ttattcaatt cctctgggaa |
| 1561 | tgttacattg tttgtctgtc ttcatagcag attttaattt tgaataaata aatgtatctt |
| 1621 | attcacatca |

[0079] An amino acid sequence for the protein (Interleukin 9 receptor (IL9R)) also known as CD129), also known as human cytokine synthesis inhibitory factor (CSIF)) encoded by the IL9R gene that is a regulator of T cell exhaustion/dysfunction resistance is available from the UniPROT database at accession no. Q01113 or accession number NP_002177 or NP_789743, cDNA NM_002186 or NM_176786 with gene location at Chr X: 156-156.01 Mb.

| (SEQ ID NO: 39) | |
|---|---|
| MGLGRCIWEGWTLESEALRRDMGTWLLACICICTCVCLGVSVTG | |
| EGQGPRSRTFTCLTNNILRIDCHWSAPELGQGSSPWLLFTSNQAPGGTHKCILRGSEC | |
| TVVLPPEAVLVPSDNFTITFHHCMSGREQVSLVDPEYLPRRHVKLDPPSDLQSNISSG | |
| HCILTWSISPALEPMTTLLSYELAFKKQEEAWEQAQHRDHIVGVTWLILEAFELDPGF | |
| IHEARLRVQMATLEDDVVEEERYTGQWSEWSQPVCFQAPQRQGPLIPPWGWPGNTLVA | |
| VSIFLLLTGPTYLLFKLSPRVKRIFYQNVPSPAMFFQPLYSVHNGNFQTWMGAHGAGV | |
| LLSQDCAGTPQGALEPCVQEATALLTCGPARPWKSVALEEEQEGPGTRLPGNLSSEDV | |
| LPAGCTEWRVQTLAYLPQEDWAPTSLTRPAPPDSEGSRSSSSSSSSNNNNYCALGCYG | |
| GWHLSALPGNTQSSGPIPALACGLSCDHQGLETQQGVAWVLAGHCQRPGLHEDLQGML | |
| LPSVLSKARSWTF | |
| (SEQ ID NO: 40) | |
| 1 | gctgtgcacc cagagatagt tgggtgacaa atcacctcca ggttggggat gcctcagact |
| 61 | tgtgatggga ctgggcagat gcatctggga aggctggacc ttggagagtg aggccctgag |
| 121 | gcgagacatg ggcacctggc tcctggcctg catctgcatc tgcacctgtg tctgcttggg |
| 181 | agtctctgtc acaggggaag gacaagggcc aaggtctaga accttcacct gcctcaccaa |
| 241 | caacattctc aggatcgatt gccactggtc tgccccagag ctgggacagg gctccagccc |
| 301 | ctggctcctc ttcaccagca accaggctcc tggcggcaca cataagtgca tcttgcgggg |
| 361 | cagtgagtgc accgtcgtgc tgccacctga ggcagtgctc gtgccatctg acaatttcac |
| 421 | catcactttc caccactgca tgtctgggag ggagcaggtc agcctggtgg acccggagta |
| 481 | cctgccccgg agacacgtta agctggaccc gccctctgac ttgcagagca acatcagttc |
| 541 | tggccactgc atcctgacct ggagcatcag tcctgccttg gagccaatga ccacacttct |
| 601 | cagctatgag ctggccttca agaagcagga agaggcctgg gagcaggccc agcacaggga |
| 661 | tcacattgtc ggggtgacct ggcttatact tgaagccttt gagctggacc ctggctttat |
| 721 | ccatgaggcc aggctgcgtg tccagatggc cacactggag gatgatgtgg tagaggagga |
| 781 | gcgttataca ggccagtgga gtgagtggag ccagcctgtg tgcttccagg ctccccagag |
| 841 | acaaggccct ctgatcccac cctgggggtg gccaggcaac acccttgttg ctgtgtccat |
| 901 | ctttctcctg ctgactggcc cgacctacct cctgctcaag ctgtcgccca gggtgaagag |
| 961 | aatcttctac cagaacgtgc cctctccagc gatgttcttc cagcccctct acagtgtaca |
| 1021 | caatgggaac ttccagactt ggatgggggc ccacggggcc ggtgtgCtgt tgagccagga |
| 1081 | ctgtgctggc accccacagg gagccttgga gccctgcgtc caggaggcca ctgcactgct |
| 1141 | cacttgtggc ccagcgcgtc cttggaaatc tgtggccctg gaggaggaac aggagggccc |
| 1201 | tgggaccagg ctcccgggga acctgagctc agaggatgtg ctgccagcag ggtgtacgga |
| 1261 | gtggagggta cagacgcttg cctatctgcc acaggaggac tgggccccca cgtccctgac |
| 1321 | taggccggct cccccagact cagagggcag caggagcagc agcagcagca gcagcagcaa |
| 1381 | caacaacaac tactgtgcct tgggctgcta tgggggatgg cacctctcag ccctcccagg |
| 1441 | aaacacacag agctctgggc ccatcccagc cctggcctgt ggcctttctt gtgaccatca |
| 1501 | gggcctggag acccagcaag gagttgcctg ggtgctggct ggtcactgcc agaggcctgg |
| 1561 | gctgcatgag gacctccagg gcatgttgct cccttctgtc ctcagcaagg ctcggtcctg |
| 1621 | gacattctag gtccctgact cgccagatgc atcatgtcca ttttgggaaa atggactgaa |
| 1681 | gtttctggag cccttgtctg agactgaacc tcctgagaag gggcccctag cagcggtcag |
| 1741 | aggtcctgtc tggatggagg ctggaggctc ccccctcaac ccctctgctc agtgcctgtg |
| 1801 | gggagcagcc tctaccctca gcatcctggc cacaagttct tccttccatt gtcccttttc |
| 1861 | tttatccctg acctctctga gaagtggggt gtggtctctc agctgttctg ccctcatacc |
| 1921 | cttaaagggc cagcctgggc ccagtggaca caggtaaggc accatgacca cctggtgtga |
| 1981 | cctctctgtg ccttactgag gcacctttct agagattaaa aggggcttga tggctgtt |

[0080] An amino acid sequence for the protein (LIFR also known as CD118 (Cluster of Differentiation 118)) also known as CD129), also known as human cytokine synthesis inhibitory factor (CSIF)) encoded by the LIFR gene that is a regulator of T cell exhaustion/dysfunction resistance is available from the UniPROT database at accession no. P42702 or accession number NP 001121143, NP_002301, NP_001351226 or NP_001351227, cDNA NM_001127671, NM_002310, NM_001364297 or NM_001364298 with gene location at Chr 5: 38.47-38.61 Mb.

| (SEQ ID NO: 41) | |
|---|---|
| MMDIYVCLKRPSWMVDNKRMRTASNFQWLLSTFILLYLMNQVNS | |
| QKKGAPHDLKCVTNNLQVWNCSWKAPSGTGRGTDYEVCIENRSRSCYQLEKTSIKIPA | |
| LSHGDYEITINSLHDFGSSTSKFTLNEQNVSLIPDTPEILNLSADFSTSTLYLKWNDR | |
| GSVFPHRSNVIWEIKVLRKESMELVKLVTHNTTLNGKDTLHHWSWASDMPLECAIHFV | |
| EIRCYIDNLHFSGLEEWSDWSPVKNISWIPDSQTKVFPQDKVILVGSDITFCCVSQEK | |
| VLSALIGHTNCPLIHLDGENVAIKIRNISVSASSGTNVVFTTEDNIFGTVIFAGYPPD | |
| TPQQLNCETHDLKEIICSWNPGRVTALVGPRATSYTLVESFSGKYVRLKRAEAPTNES | |
| YQLLFQMLPNQEIYNFTLNAHNPLGRSQSTILVNITEKVYPHTPTSFKVKDINSTAVK | |
| LSWHLPGNFAKINFLCEIEIKKSNSVQEQRNVTIKGVENSSYLVALDKLNPYTLYTFR | |
| IRCSTETFWKWSKWSNKKQHLTTEASPSKGPDTWREWSSDGKNLIIYWKPLPINEANG | |
| KILSYNVSCSSDEETQSLSEIPDPQHKAEIRLDKNDYIISVVAKNSVGSSPPSKIASM | |
| EIPNDDLKIEQVVGMGKGILLTWHYDPNMTCDYVIKWCNSSRSEPCLMDWRKVPSNST | |
| ETVIESDEFRPGIRYNFFLYGCRNQGYQLLRSMIGYIEELAPIVAPNFTVEDTSADSI | |
| LVKWEDIPVEELRGELRGYLFYFGKGERDTSKMRVLESGRSDIKVKNITDISQKTLRI | |
| ADLQGKTSYHLVLRAYTDGGVGPEKSMYVVTKENSVGLIIAILIPVAVAVIVGVVTSI | |
| LCYRKREWIKETFYPDIPNPENCKALQFQKSVCEGSSALKTLEMNPCTPNNVEVLETR | |
| SAFPKIEDTEIISPVAERPEDRSDAEPENHVVVSYCPPIIEEEIPNPAADEAGGTAQV | |
| IYIDVQSMYQPQAKPEEEQENDPVGGAGYKPQMHLPINSTVEDIAAEEDLDKTAGYRP | |
| QANVNTWNLVSPDSPRSIDSNSEIVSFGSPCSINSRQFLIPPKDEDSPKSNGGGWSFT | |
| NFFQNKPND | |
| (SEQ ID NO: 42) | |
| 1 | agtcccggct ggagcgactc ggccgtggcg gtggccgtta ccgttgcctc tgggaggctc |
| 61 | tggcggcggc ggcggcccgc ggggttcgcg gagcgcagcg ggccgccctt cgcccgtggc |
| 121 | cgcctcaagc agcctcgcgc cgacacaggg gaggcgagac ggcggctgcg gaggcggcgg |
| 181 | cgcattgtgc ccggccccct ccttggcggc tcctgccccc gggcggctgt gggatctggg |
| 241 | cagccccggg gcggcggccg aggctacaga gccggcggca ggggatggca agatagcggc |
| 301 | gcgggagcgt accgactgac tgcattgcac agatgatgga tatttacgta tgtttgaaac |
| 361 | gaccatcctg gatggtggac aataaaagaa tgaggactgc ttcaaatttc cagtggctgt |
| 421 | tatcaacatt tattcttcta tatctaatga atcaagtaaa tagccagaaa aagggggctc |
| 481 | ctcatgattt gaagtgtgta actaacaatt tgcaagtgtg gaactgttct tggaaagcac |
| 541 | cctctggaac aggccgtggt actgattatg aagtttgcat tgaaaacagg tcccgttctt |
| 601 | gttatcagtt ggagaaaacc agtattaaaa ttccagctct ttcacatggt gattatgaaa |
| 661 | taacaataaa ttctctacat gattttggaa gttctacaag taaattcaca ctaaatgaac |
| 721 | aaaacgtttc cttaattcca gatactccag agatcttgaa tttgtctgct gatttctcaa |
| 781 | cctctacatt atacctaaag tggaacgaca ggggttcagt ttttccacac cgctcaaatg |
| 841 | ttatctggga aattaaagt= ctacgtaaag agagratgga gctcgtaaaa ttagtgaccc |
| 901 | acaacacaac tctgaatggc aaagatacac ttcatcactg gagttgggcc tcagatatgc |
| 961 | ccttggaatg tgccattcat tttgtggaaa ttagatgcta cattgacaat cttcattttt |
| 1021 | ctggtctcga agagtggagt gactggagcc ctgtgaagaa catttcttgg atacctgatt |
| 1081 | ctcagactaa ggtttttcct caagataaag tgatacttgt aggctcagac ataacatttt |
| 1141 | gttgtgtgag tcaagaaaaa gtgttatcag cactgattgg ccatacaaac tgccccttga |
| 1201 | tccatcttga tggggaaaat gttgcaatca agattcgtaa tatttctgtt tctgcaagta |
| 1261 | gtggaacaaa tgtagttttt acaaccgaag ataacatatt tggaaccgtt atttttgctg |
| 1321 | gatatccacc agatactcct caacaactga attgtgagac acatgattta aaagaaatta |
| 1381 | tatgtagttg gaatccagga agggtgacag cgttggtggg cccacgtgct acaagctaca |
| 1441 | ctttagttga aagtttttca ggaaaatatg ttagacttaa aagagctgaa gcacctacaa |
| 1501 | acgaaagcta tcaattatta tttcaaatgc ttccaaatca agaaatatat aattttactt |
| 1561 | tgaatgctca caatccgctg ggtcgatcac aatcaacaat tttagttaat ataactgaaa |
| 1621 | aagtttatcc ccatactcct acttcattca aagtgaagga tattaattca acagctgtta |
| 1681 | aactttcttg gcatttacca ggcaactttg caaagattaa ttttttatgt gaaattgaaa |
| 1741 | ttaagaaatc taattcagta caagagcagc ggaatgtcac aatcaaagga gtagaaaatt |
| 1801 | caagttatct tgttgctctg gacaagttaa atccatacac tctatatact tttcggattc |
| 1861 | gttgttctac tgaaactttc tggaaatgga gcaaatggag caataaaaaa caacatttaa |
| 1921 | caacagaagc cagtccttca aaggggcctg atacttggag agagtggagt tctgatggaa |
| 1981 | aaaatttaat aatctattgg aagcctttac ccattaatga agctaatgga aaaatacttt |
| 2041 | cctacaatgt atcgtgttca tcagatgagg aaacacagtc cctttctgaa atccctgatc |
| 2101 | ctcagcacaa agcagagata cgacttgata agaatgacta catcatcagc gtagtggcta |
| 2161 | aaaattctgt gggctcatca ccaccttcca aaatagcgag tatggaaatt ccaaatgatg |
| 2221 | atctcaaaat agaacaagtt gttgggatgg gaaaggggat tctcctcacc tggcattacg |
| 2281 | accccaacat gacttgcgac tacgtcatta agtggtgtaa ctcgtctcgg tcggaaccat |
| 2341 | gccttatgga ctggagaaaa gttccctcaa acagcactga aactgtaata gaatctgatg |
| 2401 | agtttcgacc aggtataaga tataattttt tcctgtatgg atgcagaaat caaggatatc |
| 2461 | aattattacg ctccatgatt ggatatatag aagaattggc tcccattgtt gcaccaaatt |
| 2521 | ttactgttga ggatacttct gcagattcga tattagtaaa atgggaagac attcctgtgg |
| 2581 | aagaacttag aggcttttta agaggatatt tgttttactt tggaaaagga gaaagagaca |
| 2641 | catctaagat gagggtttta gaatcaggtc gttctgacat aaaagttaag aatattactg |
| 2701 | acatatccca gaagacactg agaattgctg atcttcaagg taaaacaagt taccacctgg |
| 2761 | tcttgcgagc ctatacagat ggtggagtgg gcccggagaa gagtatgtat gtggtgacaa |
| 2821 | aggaaaattc tgtgggatta attattgcca ttctcatccc agtggcagtg gctgtcattg |
| 2881 | ttggagtggt gacaagtatc ctttgctatc ggaaacgaga atggattaaa gaaaccttct |
| 2941 | accctgatat tccaaatcca gaaaactgta aagcattaca gtttcaaaag agtgtctgtg |
| 3001 | agggaagcag tgctcttaaa acattggaaa tgaatccttg taccccaaat aatgttgagg |
| 3061 | ttctggaaac tcgatcagca tttcctaaaa tagaagatac agaaataatt tccccagtag |
| 3121 | ctgagcgtcc tgaagatcgc tctgatgcag agcctgaaaa ccatgtggtt gtgtcctatt |
| 3181 | gtccacccat cattgaggaa gaaataccaa acccagccgc agatgaagct ggagggactg |
| 3241 | cacaggttat ttacattgat gttcagtcga tgtatcagcc tcaagcaaaa ccagaagaag |
| 3301 | aacaagaaaa tgaccctgta ggaggggcag gctataagcc acagatgcac ctccccatta |
| 3361 | attctactgt ggaagatata gctgcagaag aggacttaga taaaactgcg ggttacagac |
| 3421 | ctcaggccaa tgtaaataca tggaatttag tgtcuccaga ctctcctaga tccatagaca |
| 3481 | gcaacagtga gattgtctca tttggaagtc catgctccat taattcccga caatttttga |
| 3541 | ttcctcctaa agatgaagac tctcctaaat ctaatggagg agggtggtcc tttacaaact |
| 3601 | tttttcagaa caaaccaaac gattaacagt gtcaccgtgt cacttcagtc agccatctca |
| 3661 | ataagctctt actgctagtg ttgctacatc agcactgggc attcttggag ggatcctgtg |
| 3721 | aagtattgtt aggaggtgaa cttcactaca tgttaagtta cactgaaagt gttcatgtgc |
| 3781 | ttttaatgta gtctaaaagc caaagtatag tgactcagaa tcctcaatcc acaaaactca |
| 3841 | agattgggag ctctttgtga tcaagccaaa gaattctcat gtactctacc ttcaagaagc |
| 3901 | atttcaaggc taatacctac ttgtacgtac atgtaaaaca aatcccgccg caactgtttt |
| 3961 | ctgttctgtt gtttgtggtt ttctcatgtg tatacttggt ggaattgtaa gtggatttgc |
| 4021 | aggccaggga gaaaatgtcc aagtaacagg tgaagtttat ttgcctgacg tttactcctt |
| 4081 | tctagatgaa aaccaagcac agattttaaa acttctaaga ttattctcct ctatccacag |
| 4141 | cattcacaaa aattaatata atttttaatg tagtgacagc gatttagtgt tttgtttgat |
| 4201 | aaagtatgct tatttctgtg cctactgtat aatggttatc aaacagttgt ctcaggggta |
| 4261 | caaactttga aaacaagtgt gacactgacc agcccaaatc ataatcatgt tttcttgctg |
| 4321 | tgataggttt tccaagcctt ttcattattt tttagctttt atgcttgctt ccattatttc |
| 4381 | agttggttgc cctaatattt aaaatttaca cttctaagac tagagaccca cattttttaa |
| 4441 | aaatcatttt attttgtgat acagtgacag ctttatatga gcaaattcaa tattattcat |
| 4501 | aagcatgtaa ttccagtgac ttactatgtg agatgactac taagcaatat ctagcagcgt |
| 4561 | tagctgtcca tatagttctg attggatttc gttcctcctg aggagaccat gccgttgagc |
| 4621 | ttggctaccc aggcagtggt gatctttgac accttctggt ggatgttcct cccactcatg |
| 4681 | agtcttttca tcatgccaca ttatctgatc cagtcctcac atttttaaat ataaaactaa |
| 4741 | agagagaatg cttcttacag gaacagttac ccaagggctg tttcttagta actgtcataa |
| 4801 | actgatctga atccatgggc atacctgtgt tgcaggtgca gcaattgctt ggtgagctgt |
| 4861 | gcagaattga ttgccttcag cacagcatcc tctgcccacc cttgtttctc ataagcgatg |
| 4921 | tctggagtga ttgtggttct tggaaaagca gaaggaaaaa ctaaaaagtg tatcttgtat |
| 4981 | tttccctgcc ctcaggttgc ctatgtattt taccttttca tatttaaggc aaaagtactt |
| 5041 | gaaaatttta agtgtccgaa taagatatgt cttttttgtt tgtttttttt ggttgtttgt |
| 5101 | ttgtttttta tcatctgaga ttctgtaatg tattcgcaaa taatggatca attaattttt |
| 5161 | tttgaagctc atattgtatc tttttaaaaa ccatgttgtg gaaaaaagcc agagtgacaa |
| 5221 | gtgacaaaat ctatttaggt tctctgtgta tgaatcctga ttttaactgc taggattcag |
| 5281 | ctaaatttct gagctttatg atctgtggaa atttggaatg aaatgcaatt cattttgtac |
| 5341 | atacatagta tattaaaact atataatagt tcatagaaat gttcagtaat gaaaaatata |
| 5401 | tccaatcaga gccatcccta aagagtgttc tcttgtcttc ctttgtatcc tctttggctc |
| 5461 | cttcccttag cttccacccc agacatcaga cctggggctg ccttctctcc ctgccaaagc |
| 5521 | ttgctgttag cattgtctgc ttgccctcaa ctcctgcctt gttccctgtt gaaatgtatc |
| 5581 | aatcccgtac tttatctctc caggacaagg ataagtgtgg ctacagtaaa agtttattgc |
| 5641 | tctaaacggc gctaacctga gataatgaga aaaggccaga agagattgtt tgatctctgt |
| 5701 | ctgtcaatat atatgcattt caactgtgac catchggatc cagggccctt tctaacctat |
| 5761 | ataacgactc atttgtttgg ttaatgatga atatcactgg ggctcttaag tcctttcgtt |
| 5821 | ctatccaaga cttcattgtt tttttctgta tgaaaaaagt gcagaatatc actcaccttt |
| 5881 | cccctacttt tggatcccct acacgaggat cactagctta atgagaagca gagtaacgct |
| 5941 | attaagtctg ggcaagctcc ttataagttg ctgtgtgctt aaaagaatgt gatttatgtc |
| 6001 | tggggccaaa gcagttttcc ttcttttccc tcattgaatt caagacagct agacccttgt |
| 6061 | gtagatccca ggatattacc tctactcccc ccaacctgtg tgtgtaggga gagtaacaac |
| 6121 | acgggaagag gggagggaag ttggaaggag attggtcaca tgttcagttg tctgagatac |
| 6181 | tggtaaatgt gcgctgtttg tcaatgaagg ttgcatgcct gcatttacaa ggtggtctca |
| 6241 | tactgattgt gctctgtcca gttagattcg tggcttctcc cttggaagct acaattaagg |
| 6301 | actagttaga agcagaggct agatgtgttc tctccagccc ttactaactg ggaaaataat |
| 6361 | tgagaaatcc ctcttttcct cagtgaaagc ccagtcattg gttagaaaaa tctaattgtc |
| 6421 | aaactagcat tatgttccat catatctgtg ggatagtaat tcatgtaaga cacattttta |
| 6481 | cctctcttac aagtcaattc acttacaagc cagtttcaaa tcaagcttcc cttgcgagga |
| 6541 | atggagatca ttatggggct tattatgact acatttcttt tatgagtgac cattttaaat |
| 6601 | aattaatatt ttatttaata ttaaattatt aaagacttag ctagactttt aacattagat |
| 6661 | gaaccttgtg aatcatatat tgcatagatt agcacatgta tgcaatctag gtcatcaatt |
| 6721 | tgttgaattt atacagccct agatttgaga ttgtggccct gagtatctgg atagttgagt |
| 6781 | tgtgtgttta tgtgcttata tgatagaggt gctttgttcc tgcagcttag aaacagaagc |
| 6841 | agccattcac tgagaagctt aagagaggaa gtatcaacct cattttccaa accagcatta |
| 6901 | ctttcaccgc tcgtggatcz gaaagattac atttagaaca tttagtacta ttacactctc |
| 6961 | agaaactgtg gtaaaaagtc acattttcaa aacttcatgc atattgtatt cttgttggaa |
| 7021 | ataagtccta tagtttctta attgtcttca tgccgtccat atttaacaaa cattgcaagt |
| 7081 | cctttttata tttgggtaat tatttgtaat ttag gaagg agactagggg atgttttctt |
| 7141 | ccaaagggaa tttaaaatca attttatggt attttgaaag taaaatactc cttaacgtgt |
| 7201 | caatattttt aaaatgttat ctcgaagttt tctattgctc aggtatataa tctaataaaa |
| 7261 | ttttttgttt gctctaaggt tatttttgct attctctatt ttgaattatg ttaaaatttg |
| 7321 | tgtgcatttt atgaaatgcc ttttttctta ttttgaaagt gtaaaattgg gcatctcaga |
| 7381 | gtaaaatgtg ggattattag ctacaaagac taggcacatc gtgaaagctc agtaactaat |
| 7441 | tttcttgact gagtcctatc ccagagtgtc acagattcaa cagaattttc ctgaagggtg |
| 7501 | atacacacca aaatctagct tgtgtggatc tgagactatt gactcaaaga ttcaaatcta |
| 7561 | cttcggaagt gactccacgg tttgagtgaa aactgaggaa ggactcatgc ctgtatatca |
| 7621 | ctagatatct tatttctcca taattttaag tgttcataat ttcttcttct ttgatgggtg |
| 7681 | tgcaactggg gcatgtttgt accagccagc atgtgttctg cccaacagtg tgtccgtgtg |
| 7741 | tgaggttaac tgattcagaa ctcattctct tgataaacta tttcttgaaa gcatttattt |
| 7801 | taagtcttta tttcctgctg aaatgaagtt tcatgctgtc atgcccatct tatttattct |
| 7861 | agaagaaaat tttcatagaa gaaaatgatt tatggccaaa gttacagaac attcatcttt |
| 7921 | tagacttagc cttagaatat cattggaaat tactcggctt gaatttggtt cgtttttatc |
| 7981 | tttatggatt atgtaccagg gctattaata atacttaaac cccttatttt gctatggtgg |
| 8041 | ttagattttt ttattccttc tcaattagtg ctattaatta ttacatggtc gtattcatgc |
| 8101 | ttattacaga tgaactatt: ttagtgccag tgtaaaggat taagaataac attcaattag |
| 8161 | ttggctattt caggctttat tgtacatggt aatgtttcag ggagtgtgat ttggtctaga |
| 8221 | atatatccag atccttgtaa ttatgatatt gggttatgac aggattctat tatttttagc |
| 8281 | tatgaatggt gcttattttt ccctatatta ggaatgttaa tatttggatt atcagagtcc |
| 8341 | atgttataaa cagaatttac ctatgcaaga caaattctaa ctgtgcaaca ttttcatgag |
| 8401 | aattaaaagt tgtgtgttaa ggggaaaacc ctctgaatgt ttttatgtgt aagtgcctaa |
| 8461 | agaaccgtag aaacagtaca tcaaaagctc ttataaaaga aaaactgatt gaacattagc |
| 8521 | cagaaacaaa atatgattta catttttttt tttggttgct gggactgaat accctaaaaa |
| 8581 | ctaagagatg tgagtgggga aaatgtctaa ttgataagaa agttgattta tattatattt |
| 8641 | acatgcatct tctaagattg cctttacagt agccaatcag aactttaaaa aaaaaaaagc |
| 8701 | taacaacata gatcctatgt gttgccctta agactaaaat actttgcaca cgtgattgaa |
| 8761 | tggctcactt aagttgttga atttccttat acatttaaag tgtacttccg ttaagaatta |
| 8821 | ttccatttta aatgggtaac tttcagcttc cgaactattt tcctaaacat tccagttgtg |
| 8881 | tattataaaa gatcaaaata tctctaggtg gtagtacaat tttcatttat aacgtggaaa |
| 8941 | agttaactgt taggtttaac attagtatta gtgtttttgc aattgctcat agaaaagaac |
| 9001 | actgaataat ggttttcata caatttttgt aaaacattct tctcccagtt tgattccaaa |
| 9061 | tgcttttccc caaattgtcz aatatatcat aagctagtgt ttccttgtat ttaatttttc |
| 9121 | cttccaacac aatatttagg aaaaatatga ataacattgt gagtagcggg agacaacacg |
| 9181 | aaaaagaaac ctttcattgt tgtggagggg taggtgttat gtgattgatg cccttcctgg |
| 9241 | cgtttgtttt atcctgttat tttctcaaaa aagagcacgg ctttttctta aatacattta |
| 9301 | aattcagaat tgcttgcaaa agattggcct ggatagatag acatcctaga tttaagatag |
| 9361 | taccatctta aaagtatgt: gaaaggtaaa ataaatcatt tcaaaatact taactttcct |
| 9421 | aataaggatg ttaggttttc ttctctttca ttagctggcc ataagtcaag gtccttataa |
| 9481 | cactaggaaa ttaccttttt ttactttcaa aattgcatta tagtgaatta ctgtttacaa |
| 9541 | aatacacata ctgtgaacag atataagttt ctgtctttta taaggtttgt agaatgaatg |
| 9601 | tttttttaaa gtgagtatta tatgttaaat atttraagtt ttttataaat actagtaact |
| 9661 | gtttactaat ttttgtttgg tcaaatgctt gtaaatgtag ctgaaagaag atagggagaa |
| 9721 | actgcggatc ccaaactgtt ccctttttca tttcttgaaa tgttaccact acagacattt |
| 9781 | ttttaaggtg aataaacagc tgtgatgtgc tgtacctaaa atcatgttta atcgtataag |
| 9841 | gaaacatttc aatacactta tacaggaaga aaactataga tgaagtacat gtgtgtgatt |
| 9901 | cagtctgatt cacagaattc tgagagtaat atggaataaa acaactccac ttagatgata |
| 9961 | actgaagcat ttcctgcctt gtgaaaattt ggatcttaaa ttgctgttag aatgggaaat |
| 10021 | ttggacactt tatatcattg tataatttca gaatttagtt tctgtatctt ttggaaaaca |
| 10081 | tgattatagc aaaaacatag aaaataatct attactaaaa caccataaat gtaaaactag |
| 10141 | tatgcttggc tgttaactct aaagatgtta cttatgtctg tttttaaaac atgcatgtat |
| 10201 | ttaacaattt tatcatagta ttgtcatgga aaaaataaat atattttctt acatcttaca |
| 10261 | ctgacagact tgggcattat tgggtttttc cccatgttac acacttagga gaagtggctc |
| 10321 | tgctttgttg ttgtattttt ttttctatc ccgtaagaaa tacagtgctt gtaaagcaat |
| 10381 | cacatagcgc tatggatgta tttttaacat ttgagtacat tgctgtgcca ttggtgtaac |
| 10441 | atccatctgt ccattaagtc attattgttt acctgagaag ttagcatcaa aataatcaaa |
| 10501 | tagtgggaat ccaacattag caaataaata ataaatactg gtctttaaag taa |

[0081] An amino acid sequence for the protein (lymphocyte-specific protein tyrosine kinas), also known as human cytokine synthesis inhibitory factor (CSIF)) encoded by the LCK gene that is a regulator of T cell exhaustion/dysfunction resistance is available from the UniPROT database at accession no. P06239 or accession number NP_001036236, NP_001317397 or NP_005347, cDNA NM_001042771, NM_005356 or NM_001330468 with gene location at Chr 1: 32.25-32.29 Mb.

| (SEQ ID NO: 43) | |
|---|---|
| MGCGCSSHPEDDWMENIDVCENCHYPIVPLDGKGTLLIRNGSEV | |
| RDPLVTYEGSNPPASPLQDNLVIALHSYEPSHDGDLGFEKGEQLRILEQSGEWWKAQS | |
| LTTGQEGFIPFNFVAKANSLEPEPWFFKNLSRKDAERQLLAPGNTHGSFLIRESESTA | |
| GSFSLSVRDFDQNQGEVVKHYKIRNLDNGGFYISPRITFPGLHELVRHYTNASDGLCT | |
| RLSRPCQTQKPQKPWWEDEWEVPRETLKLVERLGAGQFGEVWMGYYNGHTKVAVKSLK | |
| QGSMSPDAFLAEANLMKQLQHQRLVRLYAVVTQEPIYIITEYMENGSLVDFLKTPSGI | |
| KLTINKLLDMAAQIAEGMAFIEERNYIHRDLRAANILVSDTLSCKIADFGLARLIEDN | |
| EYTAREGAKFPIKWTAPEAINYGTFTIKSDVWSFGILLTEIVTHGRIPYPGMTNPEVI | |
| QNLERGYRMVRPDNCPEELYQLMRLCWKERPEDRPTFDYLRSVLEDFFTATEGQYQPQ | |
| P | |
| (SEQ ID NO: 44) | |
| 1 | acttgtagcc tgagggctca gagggagcac cggtttggag ctgggacccc ctattttagc |
| 61 | ttttctgtgg ctggtgaatg gggatcccag gatctcacaa tctcagggac catgggctgt |
| 121 | ggctgcagct cacacccgga agatgactgg atggaaaaca tcgatgtgtg tgagaactgc |
| 181 | cattatccca tagtcccact ggatggcaag ggcacgctgc tcatccgaaa tggctctgag |
| 241 | gtgcgggacc cactggttac ctacgaaggc tccaatccgc cggcttcccc actgcaagac |
| 301 | aacctggtta tcgctctgca cagctatgag ccctctcacg acggagatct gggctttgag |
| 361 | aagggggaac agctccgcat cctggagcag agcggcgagt ggtggaaggc gcagtccctg |
| 421 | accacgggcc aggaaggctt catccccttc aattatgtgg ccaaagcgaa cagcctggag |
| 481 | cccgaaccct ggttcttcaa gaacctgagc cgcaaggacg cggagcggca gctcctggcg |
| 541 | cccgggaaca ctcacggctc cttcctcatc cgggagagcg agagcaccgc gggatcgttt |
| 601 | tractgtcgg tccgggact= cgaccagaac cagggagagg ttgtgaaaca ttacaagatc |
| 661 | cgtaatctgg acaacggtgg cttctacatc tcccctcgaa tcacttttcc cggcctgcat |
| 721 | gaactggtcc gccattacac caatgcttca gatgggctgt gcacacggtt gagccgcccc |
| 781 | tgccagaccc agaagcccca gaagccgtgg tgggaggacg agtgggaggt tcccagggag |
| 841 | acgctgaagc tggtggagcg gctgggggct ggacagttcg gggaggtgtg gatggggtac |
| 901 | tacaacgggc acacgaaggt ggcggtgaag agcctgaagc agggcagcat gtccccggac |
| 961 | gccttcctgg ccgaggccaa cctcatgaag cagctgcaac accagcggct ggttcggctc |
| 1021 | tacgctgtgg tcacccagga gcccatctac atcatcactg aatacatgga gaatgggagt |
| 1081 | ctagtggatt ttctcaagac cccttcaggc atcaagttga ccatcaacaa actcctggac |
| 1141 | atggcagccc aaattgcaga aggcatggca ttcattgaag agcggaatta tattcatcgt |
| 1201 | gaccttcggg ctgccaacat tctggtgtct gacaccctga gctgcaagat tgcagacttt |
| 1261 | ggcctagcac gcctcattga ggacaacgag tacacagcca gggagggggc caagtttccc |
| 1321 | attaagtgga cagcgccaga agccattaac tacgggacat tcaccatcaa gtcagatgtg |
| 1381 | tggtcttttg ggatcctgct gacggaaatt gtcacccacg gccgcatccc ttacccaggg |
| 1441 | atgaccaacc cggaggtgat tcagaacctg gagcgaggct accgcatggt gcgccctgac |
| 1501 | aactgtccag aggagctgta ccaactcatg aggctgtgct ggaaggagcg cccagaggac |
| 1561 | cggcccacct ttgactacct gcgcagtgtg ctggaggact tcttcacggc cacagagggc |
| 1621 | cagtaccagc ctcagccttg agaggccttg agaggccctg gggttctccc cctttctctc |
| 1681 | cagcctgact tggggagatg gagttcttgt gccatagtca catggcctat gcacatatgg |
| 1741 | actctgcaca tgaatcccac ccacatgtga cacatatgca ccttgtgtct gtacacgtgt |
| 1801 | cctgtagttg cgtggactct gcacatgtct tgtacatgtg tagcctgtgc atgtatgtct |
| 1861 | tggacactgt acaaggtacc cctttctggc tctcccattt cctgagacca cagagagagg |
| 1921 | ggagaagcct gggattgaca gaagcttctg cccacctact tttctttcct cagatcatcc |
| 1981 | agaagttcct caagggccag gactttatct aatacctctg tgtgctcctc cttggtgcct |
| 2041 | ggcctggcac acatcaggag ttcaataaat gtctgttgat gactgttgta |

[0082] An amino acid sequence for the protein (Tyrosine-protein kinase Lyn) encoded by the LYN gene that is a regulator of T cell exhaustion/dysfunction resistance is available from the UniPROT database at accession no. P07948 or accession number NP 001104567 or NP 002341, cDNA NM_001111097 or NM_002350 with gene location at Chr 8: 55.88-56.01 Mb.

| (SEQ ID NO: 45) | |
|---|---|
| MGCIKSKGKDSLSDDGVDLKTQPVRNTERTIYVRDPTSNKQQRP | |
| VPESQLLPGQRFQTKDPEEQGDIVVALYPYDGIHPDDLSFKKGEKMKVLEEHGEWWKA | |
| KSLLTKKEGFIPSNYVAKLNTLETEEWFFKDITRKDAERQLLAPGNSAGAFLIRESET | |
| LKGSFSLSVRDFDPVHGDVIKHYKIRSLDNGGYYISPRITFPCISDMIKHYQKQADGL | |
| CRRLEKACISPKPQKPWDKDAWEIPRESIKLVKRLGAGQFGEVWMGYYNNSTKVAVKT | |
| LKPGTMSVQAFLEEANLMKTLQHDKLVRLYAVVTREEPIYIITEYMAKGSLLDFLKSD | |
| EGGKVLLPKLIDFSAQIAEGMAYIERKNYIHRDLRAANVLVSESLMCKIADFGLARVI | |
| EDNEYTAREGAKFPIKWTAPEAINFGCFTIKSDVWSFGILLYEIVTYGKIPYPGRTNA | |
| DVMTALSQGYRMPRVENCPDELYDIMKMCWKEKAEERPTFDYLQSVLDDFYTATEGQY | |
| QQQP | |
| (SEQ ID NO: 46) | |
| 1 | agttcctctc ccgccgcgcc gggccgcgct gccgctcgct ccccggccgt ggcgcctccg |
| 61 | ggccagacgc gctgcagcct ccagcccgcg gcaagcgggg cggccgcgcc acccccggcc |
| 121 | ccgcgccagc agcccctcgc cgcgcgtcca gcgttcccgg ccagcagcct ccccatacgc |
| 181 | aggtcctgct gggccgcccc gtcgcgcccc ccactctgaa ctcaagtcac cgtggagctc |
| 241 | cgccgccccg aaactttcac cgcgagcggg aaatatggga tgtataaaat caaaagggaa |
| 301 | agacagcttg agtgacgatg gagtagattt gaagactcaa ccagtacgta atactgaaag |
| 361 | aactatttat gtgagagatc caacgtccaa taaacagcaa aggccagttc cagaatctca |
| 421 | gcttttacct ggacagaggt ttcaaactaa agatccagag gaacaaggag acattgtggt |
| 481 | agccttgtac ccctatgatg gcatccaccc ggacgacttg tctttcaaga aaggagagaa |
| 541 | gatgaaagtc ctggaggagc atggagaatg gtggaaagca aagtcccttt taacaaaaaa |
| 601 | agaaggcttc atccccagca actatgtggc caaactcaac accttagaaa cagaagagtg |
| 661 | gtttttcaag gatataacca ggaaggacgc agaaaggcag cttttggcac caggaaatag |
| 721 | cgctggagct ttccttatta gagaaagtga aacattaaaa ggaagcttct ctctgtctgt |
| 781 | cagagacttt gaccctgtgc atggtgatgt tattaagcac tacaaaatta gaagtctgga |
| 841 | taatgggggc tattacatct ctccacgaat cactcttccc tgtatcagcg acatgattaa |
| 901 | acattaccaa aagcaggcag atggcttgtg cagaagattg gagaaggctt gtattagtcc |
| 961 | caagccacag aagccatggg ataaagatgc ctgggagatc ccccgggagt ccatcaagtt |
| 1021 | ggtgaaaagg cttggcgctg ggcagtttgg ggaagtctgg atgggttact ataacaacag |
| 1081 | taccaaggtg gctgtgaaaa ccctgaagcc aggaactatg tctgtgcaag ccttcctgga |
| 1141 | agaagccaac ctcatgaaga ccctgcagca tgacaagctc gtgaggctct acgctgtggt |
| 1201 | caccagggag gagcccattc acatcatcac cgaguacatc gccaagggca gtttgctgga |
| 1261 | tttcctgaag agcgatgaag gtggcaaagt gctgcttcca aagctcattg acttttctgc |
| 1321 | tcagattgca gagggaatgg catacatcga gcggaagaac tacattcacc gggacctgcg |
| 1381 | agcagctaat gttctggtct ccgagtcact catgtgcaaa attgcagatt ttggccttgc |
| 1441 | tagagtaatt gaagataatg agtacacagc aagggaaggt gctaagttcc ctattaagtg |
| 1501 | gacggctcca gaagcaatca actttggatg tttcactatt aagtctgatg tgtggtcctt |
| 1561 | tggaatcctc ctatacgaaa ttgtcaccta tgggaaaatt ccctacccag ggagaactaa |
| 1621 | tgccgacgtg atgaccgccc tgtcccaggg ctacaggatg ccccgtgtgg agaactgccc |
| 1681 | agatgagctc tatgacatta tgaaaatgtg ctggaaagaa aaggcagaag agagaccaac |
| 1741 | gtttgactac ttacagagcg tcctggatga tttctacaca gccacggaag ggcaatacca |
| 1801 | gcagcagcct tagagcacag ggagacccgt ccatttggca ggggtggctg cctcatttag |
| 1861 | agaggaaaag taaccatcac tggttgcact tatgatttca tgtgcgggga tcatctgccg |
| 1921 | tgcctggatc ctgaaataga ggctaaatta ctcaggaaga acaccctcta aatgggaaag |
| 1981 | tattctgtac tcttagatgg attctccact cagttgcaac ttggacttgt cctcagcagc |
| 2041 | tggtaatctt gctctgcttg acaacatctg agtgcagccg tttgagaaga aaacatctat |
| 2101 | tctctccaaa aatgcaccca actagctcta tgtttacaaa tggacatagg actcaaagtt |
| 2161 | tcagagacca ttgcaatgaa tccccaataa ttgcagaact aaactcattt ataaagctaa |
| 2221 | aataaccgga tatatacata gcatgacatt tctttgtgct ttggcttact tgtttaaaaa |
| 2281 | aaaaaaaaaa ctaatccaac ctgttagatt ttgcaggtga agtcagcagc ttaaaaatgt |
| 2341 | ctttcccaga tttcaatgat ttttttcccc ctacctccca aaatctgaga ctgttaaaac |
| 2401 | atttttcttc tatgaacact gctcagacct gctagacatg ccataggagt ggcgtgcaca |
| 2461 | tctctctctc ttccagcagg aggagcccgt gagcacgcac agctgccctg tctgctcacc |
| 2521 | cgaaggcacc gggctcacct ggacctccca ggaaagggag aagagcctca gaaactgctc |
| 2581 | tgtgtttaga aggaatatt: ttaagagtcc agctttttca tttccacaat ttcctatatc |
| 2641 | cagatttgtt ttgacaatgt agtttggaag aactaagatt ctaatctctg aagaacctta |
| 2701 | tagggccttc taaaacataa gagtttcctt tgttgcttca aatatttgaa cattatgtta |
| 2761 | aagatcaagt attaatttta gttgtactct agaaagctaa agtgccacat tcggggctat |
| 2821 | ttttatgatt cagcaatctt ttctaaattg tgtagcatgt gtatgagact atttataccc |
| 2881 | aaggatatga aggaacataa gtgactacaa ggctctaata agccacggtg gcaggaggtt |
| 2941 | caagcggttc tgttcactaa atttttctcc tgtaagcttt gaatggaaac ttctgtatca |
| 3001 | catgatgtgt ttcacttatg ctgttgtgta tatacctaat atttctattt ttgattttat |
| 3061 | tttaatacac ctcgtccaat aacatctcaa gctttttatt tgcatttaca ttttcagctg |
| 3121 | tggtcagtgt aaaaattggt catcagctgg gggcggggtg gttagaagtg attcaacaga |
| 3181 | gctacatgct ttaaacttgc ccaagttcta cctccttcct ttgaacattt cagattggag |
| 3241 | aaccaaggag ttgattgcct gaacacctga acatccgttt atgggggcca gatagaattt |
| 3301 | gttttcaaat aggcttaaca ggcatcatta aaatttcatt ctgtgtgttt tgtttaggct |
| 3361 | tgaggtgctt agaagatggg ataaaatatt ctactttttt ctaaatttta actttgtttc |
| 3421 | ctatgtgatt tttttaaatg tcctttctaa aatattctaa aattattgat tcacaagtgc |
| 3481 | catgttcaga actatagaat attactgtta cataatgtct gcacagctgg tcccttgatt |
| 3541 | cagtggtaag gtttttgtgt acacccccct gcttgcattt tatttcagaa ccacaagtat |
| 3601 | tacccaatat gttacatgga gaggaactat aaagaatccc taaggcaaaa agaagtctct |
| 3661 | agaaaatgac tagagctttt ttttttagca taacaaattt atttaaagaa aattattaaa |
| 3721 | tttatcttcg ccttgttttg cttctcccag ttcctcctct tcttgccatt ttccacttgt |
| 3781 | ctttccctcc caatcaagcc tgtgatcctt acctccatgt gggcccttca ccagcttggg |
| 3841 | cctcatctct ggtgtccagc atgtgtggaa gtcacacgtt cccttgatga acagcacaca |
| 3901 | cagtctcctt acttagctat aggtttccag cctccctgtg acagacaggc ataatgaggg |
| 3961 | gctgaatagg tgtttgtagc attttcgggt atccagtggt gtgcaaaatg gctcatgtca |
| 4021 | tcacacctca ggttattgta gagaactgga aagacagaat ccatactccc taccgccaag |
| 4081 | attctgactt agctgttgtg cagcgggaga tgtatgtcag tctattttaa aagcttctcc |
| 4141 | agtcagctag acacagtggc tcatgcctgt aatctcagca ctttgggagg ctaaggcagg |
| 4201 | aggatcgctt gagctcagga gttagacacc agcctgagca atatagcaag tctctacaaa |
| 4261 | aaattttaaa aattagctaa gtgtggtggc acatacctat ggtcccagct actcaggagg |
| 4321 | ctgaggtggg aggattgctt gagcccagga agtcaaggct gcagtgagct atgatcgtgc |
| 1381 | cactgcactc cagcctgggc aagagtgaga ccctgtctca aaaaaaaaaa ccaaaaaaac |
| 4441 | aaaaaaaccc ttccctggtg aatataatgt atgctcagtc ttgagagtca ccatttggtt |
| 4501 | tgacccatat tacaaagccc agccttcttt ttcctcagat ggtttcattt ctcaaagggg |
| 4561 | agtggaagag aaggaaggag gaaaaaaacg tgccttcctt cctggtgaac atgaagctca |
| 4621 | ctgaacctaa aggagactca caggctagaa accagtgtcc ttagtagtag gggccacctg |
| 4681 | gggcttccgt ggcttctcca ggcatacctc ctgaggttcc acagaatccc cttgcagaaa |
| 4741 | gtacttctga tgagccactg ggaacgtgta ctgtccaagc ccccttctag gggaaattca |
| 4801 | ctgccacaga agccagcagc cctggctgtc ccaagggtgc ataaaaggat aataactaaa |
| 4861 | aggagggaat taattttgtt gcctacacca gggatagatc gagggcactg aaagcatcat |
| 4921 | aagtataaac tcatctccac gtcagcttgt ggagtctgct ttctcgctct ctcttttttt |
| 4981 | tttttttttg acagagtctc actctgtcac gcaggctaga gttgcagtgg tgcgatctca |
| 5041 | gctcattgca acctccccct ctctggttgg agcgattctt ctcctgcctc agcctcccta |
| 5101 | gtagctggaa ctacaggcac acaccatctc gcctggctaa tttttgtatt tttagtagag |
| 5161 | atggggtttc accatgttag ccaggctggt ctcgaactcc tgacctcagg cgatccgcct |
| 5221 | gcctcggctt cccaaagtgc tgggattaca agtgtgagcc actgtgcccg gtcggggtct |
| 5281 | gctttctctt tattccccgt cctctcacaa actacatcca ggggcggtag ctgctaaaag |
| 5341 | gactcaattc tgcaacctca gcttctgaca ccttcaaata aattaaatgc tggtcctagg |
| 5401 | gctcgctccc cagctcttct gatgtcactg ccaggttcca cagccagttg tcggacatct |
| 5461 | cctgcttcct cagccaagaa cacctctcag atgagatcaa accgcccagc tttcctctta |
| 5521 | gcatcttcct ttattttcca cttctggctg gtggaagaga gatcgtagtt ctctattccc |
| 5581 | tacattttaa ctccacgaat attttagatt aagtgaagtc ttgctgttct tcctgatgga |
| 5641 | aatggtaatt ataaacatac aaagataccc atacacacat tctttactca gggccctctt |
| 5701 | gtgctttggc aaatgataaa aattatctct aactcacaca acgaccctgg aagatctgga |
| 5761 | caatgctatc actatttcac agctgagaga tcgggagcat ttaaagccac agaaggaata |
| 5821 | gattcgcttc gcttcatatt gtttccttgt gaaataaaac cagtgaaaca cc |

[0083] An amino acid sequence for the protein (Nucleoplasmin-3) encoded by the NPM3 gene that is a regulator of T cell exhaustion/dysfunction resistance is available from the UniPROT database at accession no. 075607 or accession number NP_008924, cDNA NM_006993 with gene location at Chr 10: 101.78-101.78 Mb.

| (SEQ ID NO: 47) | |
|---|---|
| MAAGTAAALAFLSQESRTRAGGVGGLRVPAPVTMDSFFFGCELS | |
| GHTRSFTFKVEEEDDAEHVLALTMLCLTEGAKDECNVVEVVARNHDHQEIAVPVANLK | |
| LSCQPMLSLDDFQLQPPVTFRLKSGSGPVRITGRHQIVTMSNDVSEEESEEEEEDSDE | |
| EEVELCPILPAKKQGGRP | |
| (SEQ ID NO: 48) | |
| 1 | gagggtcccc ggctttgtgc gtgtcggggg cggagtttga agaaggctct tacagcatgg |
| 61 | ccgccggtac tgcagctgcc ttagcgtttt tgagtcagga gagccgaacg cgggccgggg |
| 121 | gtgtcggggg cctacgggtc ccggccccgg tcactatgga cagttttttc ttcggctgtg |
| 181 | agctctccgg ccacacccgc tccttcacct ttaaggtaga ggaagaggat gatgcggagc |
| 241 | acgtgctggc actaaccatg ctctgcctca ccgagggagc caaagacgag tgtaatgtgg |
| 301 | tagaagttgt ggcccggaac catgaccatc aggagatcgc agtccctgtg gccaacctca |
| 361 | agctgtcctg ccaacccatg ctcagtctgg atgacttcca gctccaacca cctgtaacct |
| 421 | tccgcctgaa gtcgggctct ggccctgtgc ggatcactgg gcggcaccag attgttacga |
| 481 | tgagcaatga tgtttctgag gaggagagcg aggaagagga agaggacagt gatgaggaag |
| 541 | aagttgagct gtgccccatc cttcctgcca aaaagcaggg gggcaggccc tagccctcct |
| 601 | aggtcagctc catgtgccat gcaccgccat gcaccctgtt ccctgacaag tttcaacaat |
| 661 | tgtaaatatt tcttccttga agaggagagc ttgggtgggg gttgggtggg agggacttgg |
| 721 | gtctttggtg ctaggagagg gcctgtgctc cacacagccg tggttttctg attttcacca |
| 781 | tgcccggggc ctcccttccc acctgcctgt gagaattgga ggttagtgcc tgaagctcag |
| 841 | agctacacat ttttaatagt ttttacattt ttggataaag gttgaaataa agtggtgtgg |
| 901 | agtttttgca |

[0084] An amino acid sequence for the protein (NAD(P)H dehydrogenase [quinone]1) encoded by the NQO1 gene that is a regulator of T cell exhaustion/dysfunction resistance is available from the UniPROT database at accession no. P15559 or accession number NP_000894, NP 001020604, NP_001020605 or NP_001273066. cDNA NM 001286137, NM_000903, NM_001025433 or NM_001025434 with gene location at Chr 16: 69.71-69.73 Mb.

| (SEQ ID NO: 49) | |
|---|---|
| MVGRRALIVLAHSERTSFNYAMKEAAAAALKKKGWEVVESDLYA | |
| MNFNPIISRKDITGKLKDPANFQYPAESVLAYKEGHLSPDIVAEQKKLEAADLVIFQF | |
| PLQWFGVPAILKGWFERVFIGEFAYTYAAMYDKGPFRSKKAVLSITTGGSGSMYSLQG | |
| IHGDMNVILWPIQSGILHFCGFQVLEPQLTYSIGHTPADARIQILEGWKKRLENIWDE | |
| TPLYFAPSSLFDLNFQAGFLMKKEVQDEEKNKKFGLSVGHHLGKSIPTDNQIKARK | |
| (SEQ ID NO: 50) | |
| 1 | acacgcgact cccacaaggt tgcagccgga gccgcccagc tcaccgagag cctagttccg |
| 61 | gccagggtcg ccccggcaac cacgagccca gccaatcagc gccccggact gcaccagagc |
| 121 | catggtcggc agaagagcac tgatcgtact ggctcactca gagaggacgt ccttcaacta |
| 181 | tgccatgaag gaggctgctg cagcggcttt gaagaagaaa ggatgggagg tggtggagtc |
| 241 | ggacctctat gccatgaact tcaatcccat cattcccaga aaggacatca caggtaaact |
| 301 | gaaggaccct gcgaactttc agtatcctgc cgagtctgtt ctggcttata aagaaggcca |
| 361 | tctgagccca gatattgtgg ctgaacaaaa gaagctggaa gccgcagacc ttgtgatatt |
| 421 | ccagttcccc ctgcagtggc ttggagtccc tgccattctg aaaggctggt ttgagcgagt |
| 481 | gttcatagga gagtttgctt acacttacgc tgccatgtat gacaaaggac ccttccggag |
| 541 | taagaaggca gtgctttcca tcaccactgg tggcagtggc tccatgtact ctctgcaagg |
| 601 | gatccacggg gacatgaatg tcattctctg gccaattcag agtggcattc tgcatttctg |
| 661 | tggcttccaa gtcttagaac ctcaactgac atatagcatt gggcacactc cagcagacgc |
| 721 | ccgaattcaa atcctggaag gatggaagaa acgcctggag aatatttggg atgagacacc |
| 781 | actgtatttt gctccaagca gcctctttga cctaaacttc caggcaggat tcttaatgaa |
| 841 | aaaagaggta caggatgagg agaaaaacaa gaaatttggc ctttctgtgg gccatcactt |
| 901 | gggcaagtcc atcccaactg acaaccagat caaagctaga aaatgagatt ccttagcctg |
| 961 | gatttccttc taacatgtta tcaaatctgg gtatctttcc aggcttccct gacttgcttt |
| 1021 | agtttttaag atttgtgttt ttctttttcc acaaggaata aatgagaggg aatcgactgt |
| 1081 | attcgtgcat ttttggatca tttttaactg attcttatga ttactatcat ggcatataac |
| 1141 | caaaatccga ctgggctcaa gaggccactt agggaaagat gtagaaagat gctagaaaaa |
| 1201 | tgttctttaa aggcatctac acaatttaat tcctcttttt agggctaaag ttttagggta |
| 1261 | cagtttggct aggtatcatt caactctcca atgttctatt aatcacctct ctgtagttta |
| 1321 | tggcagaagg gaattgctca gagaaggaaa agactgaatc tacctgccct aagggactta |
| 1381 | acttgtttgg tagttagcca tctaatgctt gtttatgata tttcttgctt tcaattacaa |
| 1441 | agcagttact aatatgccta gcacaagtac cactcttggt cagcttttgt tgtttatata |
| 1501 | cagtacacag ataccttgaa aggaagagct aataaatctc ttctttgctg cagtcatcta |
| 1561 | cttttttttt aattaaaaaa aatttttttt tgaagcagtc ttgctctgtt acccaggctg |
| 1621 | gagtgcagtg gtgtgatctc ggctcactgc aacctctgcc tcccaggttc cagcaattct |
| 1681 | cctgcctcag cctccctagc agctgggatg acaggcgcct gccatcatgc ctgactaatt |
| 1741 | tttgtatttt tagtagagac ggcgtttcac catgutggcc aggctggtct caaactcctg |
| 1801 | acctcaggtg atccgcctac ctcagcctcc caaagtgctg ggattacagg cgtgatccac |
| 1861 | cacacctggc ccttgcaatc ttctacttta aggtttgcag agataaacca ataaatccac |
| 1921 | accgtacatc tgcaatatga attcaagaaa ggaaatagta ccttcaatac ttaaaaatag |
| 1981 | tcttccacaa aaaatacttt atttctgatc tatacaaatt ttcagaaggt tattttcttt |
| 2041 | atcattgcta aactgatgac ttactatggg atggggtcca gtcccatgac cttggggtac |
| 2101 | aattgtaaac ctagagtttt atcaactttg gtgaacagtt ttggcataat agtcaatttc |
| 2161 | tacttctgga agtcatctca ttccactgtt ggtattatat aattcaagga gaatatgata |
| 2221 | aaacactgcc ctcttgtggt gcattgaaag aagagatgag aaatgatgaa aaggttgcct |
| 2281 | gaaaaatggg agacagcctc ttacttgcca agaaaatgaa gggattggac cgagctggaa |
| 2341 | aacctccttt accagatgct gactggcact ggtggttttt gctctcgaca gtatccacaa |
| 2401 | tagctgacgg ctgggtgttt cagtttgaaa atattttgtt gccttcatct tcactgcaat |
| 2461 | tttgtgtaaa tttctcaaag atctgaatta aataaataaa attcatttct acagacccac |
| 2521 | a |

[0085] An amino acid sequence for the protein (Pleckstrin homology domain-containing family H member 3) encoded by the PLEKHH3 gene that is a regulator of T cell exhaustion/dysfunction resistance is available from the UniPROT database at accession no. Q7Z736, cDNA NM_024927 with gene location at Chr 17: 42.67-42.68 Mb.

| (SEQ ID NO: 111) | |
|---|---|
| 1 | agtcccgggg ctgcagggag cgcagcgcgc gcggcccggg ccccggccac cggacgccct |
| 61 | accggacacg accctccctg gagcttggac aactgcccac ctcggacgct gcaccggaca |
| 121 | ctgcccccca cagggctgga cactccaacg gacactactt cccagctccg gacattgctc |
| 181 | cctcctctcc cggggccctg gacgcttttc cccctccccc ctccgggggc ccagacactg |
| 241 | agcccccctc agcgtctggc tagcgtcccc ttgcacccca gcccaggaca ctgcctcctc |
| 301 | cctgtcctct tctcccttct gctcctccca cctcatcttt cccctgctcg ggtcggagcc |
| 361 | ccgccagttc ctccgacccc ctactgctcg gccgcggctg cccgcgcccc catccgcagc |
| 421 | tcctcgcccg gatgcctctc cccgggggac tatggtggct tctctgctgc cgtcgaggct |
| 481 | tcactcttct gcaccgggac tacggggacg gcgagcttag cggggacggg gacgaggacg |
| 541 | aggacgagga aacctttgag ctgcggaccc cgagtccagc gggcggcggg aggggtcccc |
| 601 | tggaagtgac gctgactcag ccagtgagga gcgggcctgt ctccaacagg ctgcagagct |
| 661 | gggaggagac ttggagcctc atcccggaga aagggctgcc ggaggacgac ccggacatcg |
| 721 | ttgtgaaagg ttggctgtac cgggagcccc gcggaggagg ggcgcggccc tggctgcccc |
| 781 | cgcgccgagc ctggtttgtg ctcacgcggg actccctgga tcagttcagc agcagcggga |
| 841 | aaggggcgcg gcgtctcggg agcctcgtgc tcaccagcct gtgctcggtg accggcccag |
| 901 | agcgcaggcg taaggagaca ggtctgtggt cagtgactgt gtctggtcgg aaacacagtg |
| 961 | tccgcctctg ctccccacgc caggcagagg ctgagcgctg gggggtggca ttgcgggaag |
| 1021 | tgatcgcctc caaggcaccc ctggagaccc ccacccagct actgctcagg gacatacagg |
| 1081 | aaagttgcgg ggacccagag gccgttgccc tcatttacct gaggaacccg attctgagac |
| 1141 | acactagtgg agccttgtat gccccactcc tgcccctgcc ctatggagtc agcgccccag |
| 1201 | gtccgggcta tgcacccctg cgcgaggagg cggtgcggct gttcttggcg ctgcaggcgc |
| 1261 | tggagggggc gcggcgcccc gggcccttga tgcagggtgt gctccaaacc tgccgggact |
| 1321 | tgcccgcgct ccgggatgaa ctcttcctgc agctggctaa gcagacctcg ggccctgcag |
| 1381 | gtccccccgg gctcccggct acccaagacc ctgcggccct gcggtactgg caactcctca |
| 1441 | cctgcatgag ctgcaccttc cgacctgggg gagctgtgcg ggggcacctc ctggggcact |
| 1501 | tggagaggac cgagcaggca ctcccggact cggaactggc ggaatatgcg cgcttcatcc |
| 1561 | ggaaagcgct gggccggacg cgcggcagag agctggtgcc ctcgctggcg gagatttccg |
| 1621 | cgttgagcca acggcaggag ctgctgtgta ccgtgcactg tccgggggct ggtgcctgtg |
| 1681 | ctgtggccat cgactcccac accacggcgg gggaggtggc tcgagagctg gtggggcggc |
| 1741 | tgggcttggc ccggagccgc aacgcattcg cgctgtacga gcagcgaggg gcccaggagc |
| 1801 | gagccctggc tggggggacc ctcgtggccg acgtgctcac caggtttgag aacttggccg |
| 1861 | cggaggaagc tgggttggag gactcgcccg actccgggtg gagactatgt ctgcgtcttc |
| 1921 | acggacctct gcaccctgag gggctgtccc cagacggtca cgaactgcct ttcctctttg |
| 1981 | agcaggctca cgctctgctg ctgcggggcc ggccgccccc acccgacgac acgctgcgcg |
| 2041 | ccctggcggc gctgcgcctg cagagcctgc agcgggactt ctctccgcgg gtgcccctgc |
| 2101 | cccgcctgga ccgcctgctc ccgcccccgg ccccgccgcg cgaagacccg ccccgcccga |
| 2161 | cccccaggcc gcccccttcc gctgccctgc tggccggggc gctctggagc ccgggcctgg |
| 2221 | ccaagaggcg ggcggagcgg gcccggcgcg gcggggccgg ccgcactgcg ggaagcattg |
| 2281 | cccgcgaggg aggaggcggc gccggcacgg cagctgccgt gctgggcggc tggaagcggc |
| 2341 | tacggggcat gggccgagct gaggccatgg ccgcctacct ggccctggcg gcgcagtgtc |
| 2401 | cggggttcgg cgctgctcgg tatgacgttc tggagctgag cacggagcct ggtcggggtg |
| 2461 | ctccacagaa gctgtgcctg ggcttgggag ccaaggccat gtccctctcc cggccagggg |
| 2521 | agacggagcc catccacagt gtcagctatg gccatgtggc cgcctgccag ctaatgggcc |
| 2581 | cccacaccct ggccttgagg gtgggagaga gccagctcct cctgcagagc ccccaggtgg |
| 2641 | aagagatcat gcagctggtg aatgcctact tggccaaccc ctcccccgag aggccctgca |
| 2701 | gcagctcttc tcctccatgc caagacctgc cagacacctc ccctcccagc cagcgcccgg |
| 2761 | gcctggacga gccccaggga cagtctggct gcttggggca gctgcaggac tgagcctgcc |
| 2821 | aagaggtcac gacttccctc ctgcctgcag cctgggccag gactgctctg agatttgagg |
| 2881 | gaaacatgga cccttttggc cctgcaggga cagggcacat cccacaccca agggctacaa |
| 2941 | tgggtgtggg taattttcta gtttgtttct taatttattt gtagaagaga agcaaaaaaa |
| 3001 | aaaaaaaagt ttcttattta cacaaa |

(SED ID NO: 51)
MPLPGGLWWLLCCRRGFTLLHRDYGDGELSGDGDEDEDEETFELRTPSPAGGGRGPLEVTLTQPVRSGPVSNRLQSW
EETWSLIPEKGLPEDDPDIVVKGWLYREPRGGGARPWLPPRRAWFVLTRDSLDQFSSSGKGARRLGSLVLTSLCSVT
GPERRRKETGLWSVTVSGRKHSVRLCSPRQAEAERWGVALREVIASKAPLETPTQLLLRDIQESCGDPEAVALIYLR
NPILRHTSGALYAPLLPLPYGVSAPGPGYAPLREEAVRLFLALQALEGARRPGPLMQGVLQTCRDLPALRDELFLQL
AKQTSGPAGPPGLPATQDPAALRYWQLLTCMSCTFRPGGAVRGHLLGHLERTEQALPDSELAEYARFIRKALGRTRG
RELVPSLAEISALSQRQELLCTVHCPGAGACAVAIDSHTTAGEVARELVGRLGLARSRNAFALYEQRGAQERALAGG
TLVADVLTRFENLAAEEAGLEDSPDSGWRLCLRLHGPLHPEGLSPDGHELPFLFEQAHALLLRGRPPPPDDTLRALA
ALRLQSLQRDFSPRVPLPRLDRLLPPPAPPREDPPRPTPRPPPSAALLAGALWSPGLAKRRAERARRGGAGRTAGSI
AREGGGGAGTAAAVLGGWKRLRGMGRAEAMAAYLALAAQCPGFGAARYDVLELSTEPGRGAPQKLCLGLGAKAMSLS
RPGETEPIHSVSYGHVAACQLMGPHTLALRVGESQLLLQSPQVEEIMQLVNAYLANPSPERPCSSSSPPCQDLPDTS
PPSQRPGLDEPQGQSGCLGQLQD

[0086] An amino acid sequence for the protein (Phosphatase and tensin homolog (PTEN)) encoded by the PTEN gene that is a regulator of T cell exhaustion/dysfunction resistance is available from the UniPROT database at accession no. P60484 or accession number NP_000305, NP_001291646, NP 001291647 or NP_000305.3, cDNA NM_000314, NM 001304717 or NM_001304718 with gene location at Chr 10: 87.86-87.97 Mb.

| (SEQ ID NO: 53) | |
|---|---|
| MTAIIKEIVSRNKRRYQEDGFDLDLTYIYPNIIAMGFPAERLEG | |
| VYRNNIDDVVRFLDSKHKNHYKIYNLCAERHYDTAKFNCRVAQYPFEDHNPPQLELIK | |
| PFCEDLDQWLSEDDNHVAAIHCKAGKGRTGVMICAYLLHRGKFLKAQEALDFYGEVRT | |
| RDKKGVTIPSQRRYVYYYSYLLKNHLDYRPVALLFHKMMFETIPMFSGGTCNPQFVVC | |
| QLKVKIYSSNSGPTRREDKFMYFEFPQPLPVCGDIKVEFFHKQNKMLKKDKMFHFWVN | |
| TFFIPGPEETSEKVENGSLCDQEIDSICSIERADNDKEYLVLTLTKNDLDKANKDKAN | |
| RYFSPNFKVKLYFTKTVEEPSNPEASSSTSVTPDVSDNEPDHYRYSDTTDSDPENEPF | |
| DEDQHTQITKV | |
| (SEQ ID NO: 54) | |
| 1 | gttctctcct ctcggaagct gcagccatga tggaagtttg agagttgagc cgctgtgagg |
| 61 | cgaggccggg ctcaggcgag ggagatgaga gacggcggcg gccgcggccc ggagcccctc |
| 121 | tcagcgcctg tgagcagccg cgggggcagc gccctcgggg agccggccgg cctgcggcgg |
| 181 | cggcagcggc ggcgtttctc gcctcctctt cgtcttttct aaccgtgcag cctcttcctc |
| 241 | ggcttctcct gaaagggaag gtggaagccg tgggctcggg cgggagccgg ctgaggcgcg |
| 301 | gcggcggcgg cggcacctcc cgctcctgga gcggggggga gaagcggcgg cggcggcggc |
| 361 | cgcggcggct gcagctccag ggagggggtc tgagtcgcct gtcaccattt ccagggctgg |
| 421 | gaacgccgga gagttggtct ctccccttct actgcctcca acacggcggc ggcggcggct |
| 481 | ggcacatcca gggacccggg ccggttttaa acctcccgtg cgccgccgcc gcaccccccg |
| 541 | tggcccgggc tccggaggcc gccggcggag gcagccgttc ggaggattat tcgtcttctc |
| 601 | cccattccgc tgccgccgct gccaggcctc tggctgctga ggagaagcag gcccagtcgc |
| 661 | tgcaaccatc cagcagccgc cgcagcagcc attacccggc tgcggtccag agccaagcgg |
| 721 | cggcagagcg aggggcatca gctaccgcca agtccagagc catttccatc ctgcagaaga |
| 781 | agccccgcca ccagcagctt ctgccatctc tctcctcctt tttcttcagc cacaggctcc |
| 841 | cagacatgac agccatcatc aaagagatcg ttagcagaaa caaaaggaga tatcaagagg |
| 901 | atggattcga cttagacttg acctatattt atccaaacat tattgctatg ggatttcctg |
| 961 | cagaaagact tgaaggcgta tacaggaaca atattgatga tgtagtaagg tttttggatt |
| 1021 | caaagcataa aaaccattac aagatataca atctctgtgc tgaaagacat tatgacaccg |
| 1081 | ccaaatttaa ttgcagagtt gcacaatatc ctttcgaaga ccataaccca ccacagctag |
| 1141 | aacttatcaa acccttttgt gaagatcttg accaatggct aagtgaagat gacaatcatg |
| 1201 | ttgcagcaat tcactgtaaa gctggaaagg gacgaactgg tgtaatgata tgtgcatatt |
| 1261 | tattacatag gggcaaatt= ttaaaggcac aagaggccct agatttctat ggggaagtaa |
| 1321 | ggaccagaga caaaaaggga gtaactattc ccagtcagag gcgctatgtg tattattata |
| 1381 | gctacctgtt aaagaatcat ctggattata gaccagtggc actgttgttt cacaagatga |
| 1441 | tgtttgaaac tattccaatg ttcagtggcg gaacttgcaa tcctcagttt gtggtctgcc |
| 1501 | agctaaaggt gaagatatat tcctccaatt caggacccac acgacgggaa gacaagttca |
| 1561 | tgtactttga gttccctcag ccgttacctg tgtgtggtga tatcaaagta gagttcttcc |
| 1621 | acaaacagaa caagatgcta aaaaaggaca aaatgtttca cttttgggta aatacattct |
| 1681 | tcataccagg accagaggaa acctcagaaa aagtagaaaa tggaagtcta tgtgatcaag |
| 1741 | aaatcgatag catttgcagt atagagcgtg cagataatga caaggaatat ctagtactta |
| 1801 | ctttaacaaa aaatgatctt gacaaagcaa ataaagacaa agccaaccga tacttttctc |
| 1861 | caaattttaa ggtgaagctg tacttcacaa aaacagtaga ggagccgtca aatccagagg |
| 1921 | ctagcagttc aacttctgta acaccagatg ttagtgacaa tgaacctgat cattatagat |
| 1981 | attctgacac cactgactct gatccagaga atgaaccttt tgatgaagat cagcatacac |
| 2041 | aaattacaaa agtctgaatt tttttttatc aagagggata aaacaccatg aaaataaact |
| 2101 | tgaataaact gaaaatggac cttttttttt ttaatggcaa taggacattg tgtcagatta |
| 2161 | ccagttatag gaacaattct cttttcctga ccaatcttgt tttaccctat acatccacag |
| 2221 | ggttttgaca cttgttgtcc agttgaaaaa aggttgtgta gctgtgtcat gtatatacct |
| 2281 | ttttgtgtca aaaggacatt taaaattcaa ttaggattaa taaagatggc actttcccgt |
| 2341 | tttattccag ttttataaaa agtggagaca gactgatgtg tatacgtagg aattttttcc |
| 2401 | ttttgtgttc tgtcaccaac tgaagtggct aaagagcttt gtgatatact ggttcacatc |
| 2461 | ctaccccttt gcacttgtgg caacagataa gtttgcagtt ggctaagaga ggtttccgaa |
| 2521 | gggttttgct acattctaat gcatgtattc gggttagggg aatggaggga atgctcagaa |
| 2581 | aggaaataat tttatgctgg actctggacc atataccatc tccagctatt tacacacacc |
| 2641 | tttctttagc atgctacagc tattaatctg gacattcgag gaattggccg ctgtcactgc |
| 2701 | ttgttgtttg cgcatttttt tttaaagcat attggtgcta gaaaaggcag ctaaaggaag |
| 2761 | tgaatctgta ttggggtaca ggaatgaacc ttctgcaaca tcttaagatc cacaaatgaa |
| 2821 | gggatataaa aataatgtca taggtaagaa acacagcaac aatgacttaa ccatataaat |
| 2881 | gtggaggcta tcaacaaaga atgggcttga aacattataa aaattgacaa tgatttatta |
| 2941 | aatatgtttt ctcaattgta acgacttctc catctcctgt gtaatcaagg ccagtgctaa |
| 3001 | aattcagatg ctgttagtac ctacatcagt caacaactta cacttatttt actagttttc |
| 3061 | aatcataata cctgctgtgg atgcttcatg tgctgcctgc aagcttcttt tttctcatta |
| 3121 | aatataaaat attttgtaat gctgcacaga aattutcaat ttgagattct acagtaagcg |
| 3181 | ttttttttct ttgaagattt atgatgcact tattcaatag ctgtcagccg ttccaccctt |
| 3241 | ttgaccttac acattctatt acaatgaatt ttgcagtttt gcacattttt taaatgtcat |
| 3301 | taactgttag ggaattttac ttgaatactg aatacatata atgtttatat taaaaaggac |
| 3361 | atttgtgtta aaaaggaaat tagagttgca gtaaactttc aatgctgcac acaaaaaaaa |
| 3421 | gacatttgat ttttcagtag aaattgtcct acatgtgctt tattgatttg ctattgaaag |
| 3481 | aatagggttt tttttttttt tttttttttt ttttttaaat gtgcagtgtt gaatcatttc |
| 3541 | ttcatagtgc tcccccgagt tgggactagg gcttcaattt cacttcttaa aaaaaatcat |
| 3601 | catatatttg atatgcccag actgcatacg atttraagcg gagtacaact actattgtaa |
| 3661 | agctaatgtg aagatattat taaaaaggtt tttttttcca gaaatttggt gtcttcaaat |
| 3721 | tataccttca ccttgacatt tgaatatcca gccattttgt ttcttaatgg tataaaattc |
| 3781 | cattttcaat aacttattgg tgctgaaatt gttcactagc tgtggtctga cctagttaat |
| 3841 | ttacaaatac agattgaata ggacctacta gagcagcatt tatagagttt gatggcaaat |
| 3901 | agattaggca gaacttcatc taaaatattc ttagtaaata atgttgacac gttttccata |
| 3961 | ccttgtcagt ttcattcaac aatttttaaa tttttaacaa agctcttagg atttacacat |
| 4021 | ttatatttaa acattgatat atagagtatt gattgattgc tcataagtta aattggtaaa |
| 4081 | gttagagaca actattctaa cacctcacca ttgaaattta tatgccacct tgtctttcat |
| 4141 | aaaagctgaa aattgttacc taaaatgaaa atcaacttca tgttttgaag atagttataa |
| 4201 | atattgttct ttgttacaat ttcgggcacc gcatattaaa acgtaacttt attgttccaa |
| 4261 | tatgtaacat ggagggccag gtcataaata atgacattat aatgggcttt tgcactgtta |
| 4321 | ttatttttcc tttggaatgt gaaggtctga atgagggttt tgattttgaa tgtttcaatg |
| 4381 | tttttgagaa gccttgctta cattttatgg tgtagtcatt ggaaatggaa aaatggcatt |
| 4441 | atatatatta tatatataaa tatatattat acatactctc cttactttat ttcagttacc |
| 4501 | atccccatag aatttgacaa gaattgctat gactgaaagg ttttcgagtc ctaattaaaa |
| 4561 | ctttatttat ggcagtattc ataattagcc tgaaatgcat tctgtaggta atctctgagt |
| 4621 | ttctggaata ttttcttaga ctttttggat gtgcagcagc ttacatgtct gaagttactt |
| 4681 | gaaggcatca cttttaagaa agcttacagt tgggccctgt accatcccaa gtcctttgta |
| 4741 | gctcctcttg aacatgtttg ccatactttt aaaagggtag ttgaataaat agcatcacca |
| 4801 | ttctttgctg tggcacaggt tataaactta agtggagttt accggcagca tcaaatgttt |
| 4861 | cagctttaaa aaataaaagt agggtacaag tttaatgttt agttctagaa attttgtgca |
| 4921 | atatgttcat aacgatggct gtggttgcca caaagtgcct cctttacctt taaatactgt |
| 4981 | taatgtgtca tgcatgcaga tggaaggggt ggaactgtgc actaaagtgg gggctttaac |
| 5041 | tgtagtattt ggcagagttg ccttctacct gccagttcaa aagttcaacc tgttttcata |
| 5101 | tagaatatat atactaaaaa atttcagtct gttaaacagc cttactctga ttcagcctct |
| 5161 | tcagatactc ttgtgctgtg cagcagtggc tctgtgtgta aatgctatgc actgaggata |
| 5221 | cacaaaaata ccaatatgat gtgtacagga taatgcctca tcccaatcag atgtccattt |
| 5281 | gttattgtgt ttgttaacaa ccctttatct cttagtgtta taaactccac ttaaaactga |
| 5341 | ttaaagtctc attcttgtca ttgtgtgggt gtttrattaa atgagagttt ataattcaaa |
| 5401 | ttgcttaagt ccattgaagt tttaattaat gggcagccaa atgtgaatac aaagttttca |
| 5461 | gttttttttt ttcctgctgt ccttcaaagc ctactgttta aaaaaaaaaa aaaaaaaaaa |
| 5521 | catggcctga gagtagagta tctgtctact catgcttaat taaggaaaaa cacttatttt |
| 5581 | tagggcttta gtcatcactt cataaattgt ataagcacat taaatagcgt tctagtcctg |
| 5641 | aaaaagtcca agattcttag aaaattgtgc atatttttat tatgacagat gtttgaagat |
| 5701 | aattccccag aatggatttg atactttaga tttcaatttt gtggcttttg tctattattc |
| 5761 | tgtactctgc catcagcata tggaaagctt cattractca tcatgacttg tgccatataa |
| 5821 | aaattgatat ttcggaatag tctaaaggac tttttgtact tgaatttaat catgttgttt |
| 5881 | ctaatattct taaaagcttg aagactaaag catatccttt caacaaagca tagtaaggta |
| 5941 | ataagaaagt gtagtttgta caagtgttaa aaaaataaag tagacaatgt tacagtggga |
| 6001 | cttattattt caagtttaca ttttctccat gtaatttttt aaaaagtaaa tgaaaaaatg |
| 6061 | tgcaataatg taaaatatga agtgtatgtg tacacacatt ttatttttcg gtatcttggg |
| 6121 | tatacgtatg gttgaaaact atactggagt ctaaaagtat tctaatttat aagaagacat |
| 6181 | tttggtgatg tttgaaaaat agaaatgtgc tagttttgtt tttatatcat gtcctttgta |
| 6241 | cgttgtaata tgagctggct tggttcagta aatgccatca ccatttccat tgagaattta |
| 6301 | aaactcacca gtgtttaata tgcaggcttc caaaggctta tgaaaaaaat caagaccctt |
| 6361 | aaatctagtt aatttgctgc taacatgaaa ctctttggtt cttttatttt tgccagataa |
| 6421 | ttagacacac atctaaagct tagtcttaaa tggcttaagt gtagctattg attagtgctg |
| 6481 | ttgctagttc agaaagaaat gtttgtgaat ggaaacaaga atattcagtc caaactgttg |
| 6541 | taaggacagt acctgaaaac caggaaacag gataatggaa aaagtctttt aaagatgaaa |
| 6601 | tgttggagcc aactttctta tagaattaat tgtatgtggc tatagaaagc ctaatgattg |
| 6661 | ttgcttattt ttgagagcat attattcttt tatgaccata atcttgctgt ttttccatct |
| 6721 | tccaaaagat cttccttcta atatgtatat cagaatgtgg gtagccagtc agacaaattc |
| 6781 | atattggttg gtagctttaa aaagtttgta atgtgaagac aggaaaggac aaaatagttt |
| 6841 | gctttggtgg tagtactctg gttgttaagc taggtatttt gagactactt ccccatcaca |
| 6901 | acaacaataa aataatcact cataatccta tcacctggag acatagccat cgttaatatg |
| 6961 | ttagtgacta tacaatcatg ttttcttctg tatatccatg tatattcttt aaaaatgaaa |
| 7021 | tttatactgt acctgatctc aaagcttttt agcttagtat atctgtcatg aatttgtagg |
| 7081 | atgttccatt gcatcagaaa acggacagtg atttgattac tttctaatgc cacagatgca |
| 7141 | gattacatgt agttattgag aatcctttcg aattcagtgg cttaatcatg aatgtctaaa |
| 7201 | tattgttgac attaggatga tacatgtaaa ttaaagttac atttgtttag catagacaag |
| 7261 | cttaacattg tagatgtttc tcttcaaaaa tcatcttaaa catttgcatt tggaattgtg |
| 7321 | ttaaatagaa tgtgtgaaac actgtattag taaacttcat cacctttcta cttccttata |
| 7381 | gtttgaactt ttcagttttt gtagttccca aacagttgct caatttagag caaattaatt |
| 7441 | taacacctgc caaaaaaagg ctgctgttgg cttatcagtt gtctttaaat tcaaatgctc |
| 7501 | atgtgacttt tatcacatca aaaaatattt cattaatgat tcacctttag ctctgaaaat |
| 7561 | taccgcgttt agtaattata gtgggcttat aaaaacatgc aactcttttt gatagttatt |
| 7621 | tgagaatttt ggtgaaaaat atttagctga gggcagtata gaacttataa accaatatat |
| 7681 | tgatattttt aaaacatttt tacatataag taaactgcca tctttgagca taactacatt |
| 7741 | taaaaataaa gctgcatatt tttaaatcaa gtgtttaaca agaatttata ttttttattt |
| 7801 | tttaaaatta aaaataattt atatttcctc tgttgcatga ggattctcat ctgtgcttat |
| 7861 | aatggttaga gattttatt: gtgtggaatg aagtgaggct tgtagtcatg gttctagtgt |
| 7921 | ttcagtttgc caagtctgtt tactgcagtg aaattcatca aatgtttcag tgtggttttc |
| 7981 | tgtagcctat catttactgg ctattttttt atgtacacct ttaggatttt ctgcctactc |
| 8041 | tatccagttg tccaaatgat atcctacatt ttacaaatgc cctttcagtt tctattttct |
| 8101 | ttttccatta aattgccctc atgtcctaat gtgcagtttg taagtgtgtg tgtgtgtgtc |
| 8161 | tgtgtgtgtg tgaatttgat tttcaagagt gctagacttc caatttgaga gattaaataa |
| 8221 | tttaattcag gcaaacatt: ttcattggaa tttcacagtt cattgtaatg aaaatgttaa |
| 8281 | tcctggatga cctttgacat acagtaatga atcttggata ttaatgaatt tgttagtagc |
| 8341 | atcttgatgt gtgttttaat gagttatttt caaagttgtg cattaaacca aagttggcat |
| 8401 | actggaagtg tttatatcaa gttccatttg gctactgatg gacaaaaaat agaaatgcct |
| 8461 | tcctatggag agtatttttc ctttaaaaaa ttaaaaaggt taattatttt gacta |

[0087] An amino acid sequence for the protein (Refilin-B) encoded by the RFLB gene that is a regulator of T cell exhaustion/dysfunction resistance is available from the UniPROT database at accession no. Q8N5W9 or accession number NP_874364, cDNA NM_182705.3 with gene location at chromosome=“17”/map=“17p13.3”.

| (SEQ ID NO: 55) | |
|---|---|
| MVGRLSLQDVPELVDAKKKGDGVLDSPDSGLPPSPSPSHWGLAAGGGGGERAAAPGTLEPDAAAATPAAPSPASLPL | |
| APGCALRLCPLSFGEGVEFDPLPPKEVRYTSLVKYDSERHFIDDVQLPLGLAVASCSQTVTCVPNGTWRNYKAEVRF | |
| EPRHRPTRFLSTTIVYPKYPKAVYTTTLDYNCRKTLRRFLSSVELEAAELPGSDDLSDEC | |
| (SEQ ID NO: 56) | |
| 1 | gccggggcgg gcagcggcga gacccgggcg gcgcgcgggc ggcggggcag ggagggaggt |
| 61 | agggcggccg ggcgggcagc ggccccggcc cgcgtctgcg cccctcgctg tcccgcgacc |
| 121 | ccggcgcggg tgcctcgggc ccccctcgcg cgccgccatg gtgggccggc tgagcctaca |
| 181 | ggatgtgccc gagctcgtgg acgcgaagaa gaagggcgac ggcgtcctgg acagcccgga |
| 241 | ctcggggctg ccccccagcc ccagccccag ccactggggg ctcgcggcgg gcggaggcgg |
| 301 | cggagagcgc gcggcggcac cggggacgct ggagcccgac gcggcggcgg cgacccccgc |
| 361 | ggctccgagt ccagcgtctc tccccctggc tcccggctgt gcgctgaggc tttgtcccct |
| 421 | gtcctttggc gaaggagtgg agtttgaccc cttaccacca aaggaagtaa ggtacacctc |
| 481 | cttggtcaag tacgactccg agaggcactt catcgacgac gtgcagctgc ccctgggcct |
| 541 | ggcggtggcc tcctgcagcc agacggtcac ctgtgtcccc aatggcacgt ggcgcaacta |
| 601 | caaggccgag gtgcgcttcg agccacgcca caggcccacc cgcttcctca gtaccaccat |
| 661 | cgtgtacccc aagtacccca aggccgtcta caccaccacc ctggattaca actgccgcaa |
| 721 | gacgctgagg aggtttctgt ccagcgtgga gctcgaagcc gcggagctcc cgggcagcga |
| 781 | cgacctctct gatgaatgct gacccagcag gctgggctgg ggtcggaccg gctctcccgc |
| 841 | tgtcctgccc ccgactgccc tggccaagct gggcgacctt acccttcacg tcattccagc |
| 901 | cccagaggag tctaacctag agatacctcc aagcgcggcc gggggaagag aaaaaaaaga |
| 961 | aaaaatcact gcatctcata attattgaga tctttgtgtt gtaattttca agctgttttt |
| 1021 | agagggaata tatgtcctgg tttgctgctg tgttgtttcc ccaaagtctc aatcagatga |
| 1081 | ggcaacaaaa agaccaccag aattgcagga aagcagcagc agtctgggat agggaggggg |
| 1141 | gaggagagct ctccctccgt ggtcagtttg tcagaagaaa agcatggaaa aagtgagatt |
| 1201 | taagaaatct cagccacggg tgtcttcact gcacaaaagt ggtgctaatt cagtaaacag |
| 1261 | tgacacctgt gtgggttcaa tctgtggaga gttgagttcc attcctttgt ttttaaattt |
| 1321 | ccacctccat ttgtgtttcc tattaaccta aactcttgta attctctaaa tcttttttca |
| 1381 | tgatataaaa aaaaaagaaa atcccaaacc acaatttaag atgccttttt tttttaaaaa |
| 1441 | aaaaggttct ccgtgttgcc acctgctccg ggaaggccag gccgatgggc ggccaggttt |
| 1501 | gggagcagcg gcttcggctc cgattgcttc ctgacggtca gttccaagca caggctctga |
| 1561 | gaaacgcctc gaacccttgg tatctggtga ccgtctccgc aggcttccgt gagtctccga |
| 1621 | taggtgtttt gggcttttgg aatactttca gaatactttc ccattttttc ataaggcaaa |
| 1681 | acggagtgga cggccttttt ttgagagaaa cagcattcta agagtgtgct tggaaaacac |
| 1741 | actttttggg agtccacgtg gggagtggac actcaggaca ggaagcggtg gccctaagac |
| 1801 | ctgcggccac ccggaggagg cagacgcagg cgatgacctg gttcatcatg agaggagcta |
| 1861 | gagttgactc agtcttagga tctcgatggc gtcagaattg cagagggttt ctgccagtgc |
| 1921 | cttaggtcta attcagaaag caaggaaggc tgggcacggt ggctggcgcc tgtagtctca |
| 1981 | gctacttgga aactgaggca ggaggatctc ttgagcccaa gaattcgaga ccggtctggc |
| 2041 | aacatagtga gcctccatch ctaaaaaaaa gtggcaaagc tgaggaaatc tgtgccccca |
| 2101 | tcccccgaca ccagacaagc taaggtgcat tcagagtagg gaacgatgtc aaaacctggc |
| 2161 | cgccgtggtg gcgcgcattc ctctcacacc accgtacgga ggcaggtgac agtcaactga |
| 2221 | aatgtcccca aggaccgtgt gaattcggct ggcgtggccc agcagcgggg tggaccaggg |
| 2281 | tgcggtggct tcagacctgc ctcccgccac cccgtcctcc cctaacccct tcttgggacc |
| 2341 | tcctgccaat ccctgtggtg tttgagtaaa gaaagtggct gatggtttta cttttttctt |
| 2401 | ccaatattgg aaagaacaaa ctagatattc cccttgaaca catccaaatt atttccagtg |
| 2461 | cctgagggtt accgagcact gtaagctcag ctcggctgta gctccgggtt tctgccgatg |
| 2521 | gcctccatct gcgccgaaag ctgaactgag ccccgcggtg ccccggagcc acagcagcag |
| 2581 | gtgcagcgac aatcgccgtc gtgcgcagtc gctggagtcc tggagagcca cgctgtcctc |
| 2641 | tgcagacaac agcatcagtc cgctgtgccc caatgcatcg acgccctgtg gacggggcct |
| 2701 | gcagtccacc cgtggtctga gcttgccggg ctgaagctcg gctgggaccc agggaggggc |
| 2761 | caccctggga cccacagtct cctcagtcac gtgcagagca aaaaatgctt cctgtgtttg |
| 2821 | gaagagcaag tgacgcagca tttattgata aaaatggatt tttctgtctg atttcatgct |
| 2881 | gtggtcgttt aagtggtcaa tgtctttttt tttttttttt ttgacatgga gtctcgctct |
| 2941 | gttgcccagg ctgagtggaa tggcgccaac tcagctcact gcaaccttca cctcccaggc |
| 3001 | tcaagcgact ctcctgcctc agcctcctga gcagctggga ttacaggtgc ccaccaccac |
| 3061 | gcccagctaa tttttgtatt tttagtagag acggggtttc accatgttgg ccaggctggt |
| 3121 | ctcgaacacc tgaccttgtg atccacccgc ctcggcctcc caataatttg taagttatgt |
| 3181 | tagcgggatc ctcaaggcct tgctttgccc cgtggagacg cttgctcgga tgagctcagg |
| 3241 | aaacagtacc ggctgcgtgg caggtctggg tgttgtgtgc gaggacgtgg cctttgaaca |
| 3301 | ccgctgtgtt ctcagaggtc cttaggagat attttttttt gtcttagggg gactgtgtta |
| 3361 | agttcagaca aatcatgctg ggtgtgtaga gagtgtgaaa tacgtcagtg aagtaagtag |
| 3421 | cagtgagcga ttgtgaatgt gtaatgtaaa tggaaaaccg ggttttaccg tgttaagtta |
| 3481 | ttcactaggg agccagtcgt agttctttgt aatcctcttt cttccaaacc tgctttgctg |
| 3541 | aaagttgcag aaaaggaag= gtgtggagag aaacagaacc cttcagggtg ggtcagagga |
| 3601 | cgccatccac agtggattcg tgttcgtttg caggtggaag cagtgatttt taggacccac |
| 3661 | tgattaaaaa caaacattcc caagtgtctc tgagagatgc tgtttatttg ttaattaaaa |
| 3721 | agcttttttc tctgtctttt aaattatggc tttcatgtaa taaggatatt tttagtgaaa |
| 3781 | aattgttttc ctttcaaatt acagaccttt taaaaaaact taatttgagc gagtaccttt |
| 3841 | tcatttgaca cttttcctgt ttctaacctt aggaaaccag aatagcgttt ggcagacacg |
| 3901 | acgttttcag tttacctttg acacctgccc cactccattt tgctttgtga tgtcttcatt |
| 3961 | taacaataaa ttatctgaaa aaacaaaa |

[0088] An amino acid sequence for the protein (Signal transducer and activator of transcription 5A) encoded by the STAT5A gene that is a regulator of T cell exhaustion/dysfunction resistance is available from the UniPROT database at accession no. P42229 or accession number NP 001275647, NP_001275648, NP_001275649 or NP_003143, cDNA NM_001288718, NM_001288719, NM_001288720 or NM_003152 with gene location at Chr 17: 42.29-42.31 Mb.

| (SEQ ID NO: 57) | |
|---|---|
| MAGWIQAQQLQGDALRQMQVLYGQHFPIEVRHYLAQWIESQPWD | |
| AIDLDNPQDRAQATQLLEGLVQELQKKAEHQVGEDGFLLKIKLGHYATQLQKTYDRCP | |
| LELVRCIRHILYNEQRLVREANNCSSPAGILVDAMSQKHLQINQTFEELRLVTQDTEN | |
| ELKKLQQTQEYFIIQYQESLRIQAQFAQLAQLSPQERLSRETALQQKQVSLEAWLQRE | |
| AQTLQQYRVELAEKHQKTLQLLRKQQTIILDDELIQWKRRQQLAGNGGPPEGSLDVLQ | |
| SWCEKLAEIIWQNRQQIRRAEHLCQQLPIPGPVEEMLAEVNATITDIISALVTSTFII | |
| EKQPPQVLKTQTKFAATVRLLVGGKLNVHMNPPQVKATIISEQQAKSLLKNENTRNEC | |
| SGEILNNCCVMEYHQATGTLSAHFRNMSLKRIKRADRRGAESVTEEKFTVLFESQFSV | |
| GSNELVFQVKTLSLPVVVIVHGSQDHNATATVLWDNAFAEPGRVPFAVPDKVLWPQLC | |
| EALNMKFKAEVQSNRGLTKENLVFLAQKLFNNSSSHLEDYSGLSVSWSQFNRENLPGW | |
| NYTFWQWFDGVMEVLKKHHKPHWNDGAILGFVNKQQAHDLLINKPDGTFLLRFSDSEI | |
| GGITIAWKFDSPERNLWNLKPFTTRDFSIRSLADRLGDLSYLIYVFPDRPKDEVFSKY | |
| YTPVLAKAVDGYVKPQIKQVVPEFVNASADAGGSSATYMDQAPSPAVCPQAPYNMYPQ | |
| NPDHVLDQDGEFDLDETMDVARHVEELLRRPMDSLDSRLSPPAGLFTSARGSLS | |
| (SEQ ID NO: 58) | |
| 1 | agtaacagcc gccgctgccg ccgccgccag gaaccccggc cgggagcgag agccgcgggg |
| 61 | cgcagagccg gcccggctgc cggacggtgc ggccccacca ggtgaacggc catggcgggc |
| 121 | tggatccagg cccagcagct gcagggagac gcgctgcgcc agatgcaggt gctgtacggc |
| 181 | cagcacttcc ccatcgaggt ccggcactac ttggcccagt ggattgagag ccagccatgg |
| 241 | gatgccattg acttggacaa tccccaggac agagcccaag ccacccagct cctggagggc |
| 301 | ctggtgcagg agctgcagaa gaaggcggag caccaggtgg gggaagatgg gtttttactg |
| 361 | aagatcaagc tggggcacta cgccacgcag ctccagaaaa catatgaccg ctgccccctg |
| 421 | gagctggtcc gctgcatccg gcacattctg tacaatgaac agaggctggt ccgagaagcc |
| 481 | aacaattgca gctctccggc tgggatcctg gttgacgcca tgtcccagaa gcaccttcag |
| 541 | atcaaccaga catttgagga gctgcgactg gtcacgcagg acacagagaa tgagctgaag |
| 601 | aaactgcagc agactcagga gtacttcatc atccagtacc aggagagcct gaggatccaa |
| 661 | gctcagtttg cccagctggc ccagctgagc ccccaggagc gtctgagccg ggagacggcc |
| 721 | ctccagcaga agcaggtgtc tctggaggcc tggttgcagc gtgaggcaca gacactgcag |
| 781 | cagtaccgcg tggagctggc cgagaagcac cagaagaccc tgcagctgct gcggaagcag |
| 841 | cagaccatca tcctggatga cgagctgatc cagtggaagc ggcggcagca gctggccggg |
| 901 | aacggcgggc cccccgaggg cagcctggac gtgctacagt cctggtgtga gaagttggcc |
| 961 | gagatcatct ggcagaaccg gcagcagatc cgcagggctg agcacctctg ccagcagctg |
| 1021 | cccatccccg gcccagtgga ggagatgctg gccgaggtca acgccaccat cacggacatt |
| 1081 | atctcagccc tggtgaccag cacattcatc attgagaagc agcctcctca ggtcctgaag |
| 1141 | acccagacca agtttgcagc caccgtacgc ctgctggtgg gcgggaagct gaacgtgcac |
| 1201 | atgaatcccc cccaggtgaa ggccaccatc atcagtgagc agcaggccaa gtctctgctt |
| 1261 | aaaaatgaga acacccgcaa cgagtgcagt ggtgagatcc tgaacaactg ctgcgtgatg |
| 1321 | gagtaccacc aagccacggg caccctcagt gcccacttca ggaacatgtc actgaagagg |
| 1381 | atcaagcgtg ctgaccggcg gggtgcagag tccgtgacag aggagaagtt cacagtcctg |
| 1441 | tttgagtctc agttcagtgt tggcagcaat gagcttgtgt tccaggtgaa gactctgtcc |
| 1501 | ctacctgtgg ttgtcatcgt ccacggcagc caggaccaca atgccacggc tactgtgctg |
| 1561 | tgggacaatg cctttgctga gccgggcagg gtgccatttg ccgtgcctga caaagtgctg |
| 1621 | tggccgcagc tgtgtgaggc gctcaacatg aaattcaagg ccgaagtgca gagcaaccgg |
| 1681 | ggcctgacca aggagaacct cgtgttcctg gcgcagaaac tcttcaacaa cagcagcagc |
| 1741 | cacctggagg actacagtgg cctgtccgtg tcctggtccc agttcaacag ggagaacttg |
| 1801 | ccgggctgga actacacctt ctggcagtgg tttgacgggg tgatggaggt gttgaagaag |
| 1861 | caccacaagc cccactggaa tgatggggcc atcctaggtt ttgtgaataa gcaacaggcc |
| 1921 | cacgacctgc tcatcaacaa gcccgacggg accttcttgt tgcgctttag tgactcagaa |
| 1981 | atcgggggca tcaccatcgc ctggaagttt gactccccgg aacgcaacct gtggaacctg |
| 2041 | aaaccattca ccacgcggga tttctccatc aggtccctgg ctgaccggct gggggacctg |
| 2101 | agctatctca tctatgtgt: tcctgaccgc cccaaggatg aggtcttctc caagtactac |
| 2161 | actcctgtgc tggctaaagc tgttgatgga tatgtgaaac cacagatcaa gcaagtggtc |
| 2221 | cctgagtttg tgaatgcatc tgcagatgct gggggcagca gcgccacgta catggaccag |
| 2281 | gccccctccc cagctgtgtg cccccaggct ccctataaca tgtacccaca gaaccctgac |
| 2341 | catgtactcg atcaggatgg agaattcgac ctggatgaga ccatggatgt ggccaggcac |
| 2401 | gtggaggaac tcttacgccg accaatggac agtcttgact cccgcctctc gccccctgcc |
| 2461 | ggtcttttca cctctgccag aggctccctc tcatgaatgt ttgaatccca cgcttctctt |
| 2521 | tggaaacaat atgcaatgtg aagcggtcgt gttg gagtt tagtaaggct gtgtacactg |
| 2581 | acacctttgc aggcatgcat gtgcttgtgt gtgtgtgtgt gtgtgtgtcc ttgtgcatga |
| 2641 | gctacgcctg cctcccctgt gcagtcctgg gatgtggctg cagcagcggt ggcctctttt |
| 2701 | cagatcatgg catccaagag tgcgccgagt ctgtctctgt catggtagag accgagcctc |
| 2761 | tgtcactgca ggcactcaat gcagccagac ctattcctcc tgggcccctc atctgctcag |
| 2821 | cagctatttg aatgagatga ttcagaaggg gaggggagac aggtaacgtc tgtaagctga |
| 2881 | agtttcactc cggagtgaga agctttgccc tcctaagaga gagagacaga gagacagaga |
| 2941 | gagagaaaga gagagtgtgt gggtctatgt aaatgcatct gtcctcatgt gttgatgtaa |
| 3001 | ccgattcatc tctcagaagg gaggctgggg ttcattttcg agtagtattt tatactttag |
| 3061 | tgaacgtgga ctccagactc tctgtgaacc ctatgagagc gcgtctgggc ccggccatgt |
| 3121 | ccttagcaca ggggggccgc cggtttgagt gagggtttct gagctgctct gaattagtcc |
| 3181 | ttgcttggct gcttggcctt gggcttcatt caagtctatg atgctgttgc ccacgtttcc |
| 3241 | cgggatatat attctctccc ctccgttggg ccccagcctt ctttgcttgc ctctctgttt |
| 3301 | gtaaccttgt cgacaaagag gtagaaaaga ttgggtctag gatatggtgg gtggacaggg |
| 3361 | gccccgggac ttggagggtt ggtcctcttg cctcctggaa aaaacaaaaa caaaaaactg |
| 3421 | cagtgaaaga caagctgcaa atcagccatg tgctgcgtgc ctgtggaatc tggagtgagg |
| 3481 | ggtaaaagct gatctggttt gactccgctg gaggtggggc ctggagcagg ccttgcgctg |
| 3541 | ttgcgtaact ggctgtgttc tggtgaggcc ttgctcccaa ccccacacgc tcctccctct |
| 3601 | gaggctgtag gactcgcagt caggggcagc tgaccatgga agattgagag cccaaggttt |
| 3661 | aaacttctct gaagggaggt ggggatgaga agaggggttt ttttgtactt tgtacaaaga |
| 3721 | ccacacattt gtgtaaacag tgttttggaa taaaatattt ttttcataaa |

[0089] An amino acid sequence for the protein (Leucine-rich repeat (LRR) protein SHOC-2) encoded by the SHOC2 gene that is a regulator of T cell exhaustion/dysfunction resistance is available from at accession number Q9UQ13, cDNA NM_007373 with gene location at Chr 10: 110.92-111.01.

| (SEQ ID NO: 112) | |
|---|---|
| 1 | gaagaggagg aaggagggcg agcgaggagg atggcggagt cggggctcct gacggaactc |
| 61 | taatgaatca ttgattgacc agcactattt taccagttgg aatgaatgat cagaaatggg |
| 121 | catagtgctt ttagatccaa catgtaacag atggatgtta ctccatgctg attacttctt |
| 181 | caagccagta cttttttgat tgtgtaggat ctttgtctct tcatctttga attcaattac |
| 241 | tggaaaataa aaggagttca tgtagttttt gtccaggctt gagtcaccat gagtagtagt |
| 301 | ttaggaaaag aaaaagactc taaagaaaaa gatcccaaag taccatcagc caaggaaaga |
| 361 | gaaaaggagg caaaagcctc tggaggtttt gggaaagaga gcaaagaaaa agaacctaag |
| 421 | accaaaggga aagatgccaa agatggaaag aaggactcca gtgctgccca accaggggtg |
| 481 | gcattttcag ttgacaatac gatcaaacgg ccaaacccag cacctgggac tagaaaaaaa |
| 541 | tccagcaatg cagaggtgat taaagagctc aacaaatgcc gggaagagaa ttcaatgcgt |
| 601 | ttggacttat ccaagagatc tatacacata ttgccatcat caatcaaaga gttgactcaa |
| 661 | ttaacagaac tttatttata cagtaacaaa ttgcagtccc tcccagcaga ggtgggatgt |
| 721 | ttagtaaatc tcatgacact ggctctaagt gaaaattcac ttaccagttt gcctgactct |
| 781 | cttgataact tgaagaagct gcggatgctt gatttacggc ataataaact gagagaaatt |
| 841 | ccttcagtgg tgtataggct ggattctctc accactcttt accttcgctt taatcgtata |
| 901 | actactgtgg aaaaggacat caaaaacttg tcaaaactca gcatgcttag cattcgagag |
| 961 | aacaaaatta aacaactacc tgctgaaatt ggtgaattat gtaacctcat tacgctggat |
| 1021 | gtagctcaca atcaacttga acaccttcca aaggagattg gaaactgtac acagataacc |
| 1081 | aaccttgact tgcagcacaa tgaactgcta gaccccccag atactatagg aaacctgtcc |
| 1141 | agtttaagtc gtcttggtct gagatataac agactgtcag caatacccag atcattagca |
| 1201 | aaatgcagtg cacttgaaga attaaattta gagaacaata acatttctac tttaccagag |
| 1261 | agtcttttat caagtcttgt gaaactgaat agtttgacct tagctagaaa ttgcttccag |
| 1321 | ttgtatccag tgggtggtcc atctcagttt tctaccatct attccctcaa catggaacac |
| 1381 | aatcgaatca acaaaattcc atttggaatt ttctccagag caaaagtatt aagtaagctg |
| 1441 | aatatgaagg acaatcagtt aacatcactt ccctcggatt ttggaacttg gaccagtatg |
| 1501 | gtagaattga atttagccac taatcagctc acaaagatcc ctgaggatgt gtctggtctc |
| 1561 | gtttctcttg aggttcttat cttatcaaac aatcttctaa agaagcttcc ccatggtctt |
| 1621 | ggaaacctta ggaagttaag agagttggat ctagaagaga acaaattgga atccttgcca |
| 1681 | aatgaaattg catatcttaa ggatttacag aaattagtct tgacaaacaa ccagttgacc |
| 1741 | actcttccca gaggcattgg tcaccttact aatctcacac atctgggcct tggagagaac |
| 1801 | ctacttactc accttcctga agaaattggt acactggaga acctagaaga actgtatttg |
| 1861 | aatgacaacc ccaacctgca tagccttccc tttgagctgg cactctgcag caagctttca |
| 1921 | atcatgagta ttgagaactg tccactcagt caccttccac ctcagattgt tgctgggggg |
| 1981 | ccttctttca tcattcagtt cttaaagatg cagggtccat atcgtgccat ggtctgatat |
| 2041 | aaatctgctg gtcccacaca ctgttcaaaa atagactgcc attaatgttt cttatctata |
| 2101 | tctgtatcta tttatgtaga tattggtata tggcagattt ataaaaattg cattatgtgt |
| 2161 | ttctgctaat agaggaatca tagccattta gaattttttt taaattctgt acaaaaggct |
| 2221 | tatataagtt ttctttgctg aatttgatgg atgtttttct gttgtgtaat ctgatatgcc |
| 2281 | agtttgctta aaacatttgc caacacatta tgaagttatt aaatttaagg gacagaggta |
| 2341 | gtatagttag atatactttc tcttaggaaa aataatgggc aaaaattttt gttgcaactt |
| 2401 | ttcatatata ttttcccctt accaattgtt ttatccttat agtattgtag gccctgaaag |
| 2461 | tagaattttt ctttaactta ttttgagatt tgagatttaa attttatgta ttgtttacag |
| 2521 | tcagagtaaa tcactggatt tcttttgttt gttttgattt gctctgtttt attcagtcaa |
| 2581 | atctagagtt tgaatcctct gctaaagaat ttgcatccac tggtgtaaac agtgaaaggt |
| 2641 | atttgcttgt tgaaaaaaaa aactggcaaa gtgaaaagat acagtcaaaa atctagaatt |
| 2701 | tctttaattt tgcttctctg acgagttgtg aagcaaaata cctgaagtga gtctttgggt |
| 2761 | aggggaaggg tattgagacc ttttctagta tgaatatttt ttaagtttgg gggaagagaa |
| 2821 | acttgcagtg aaaaggagtt ttttcattcc tgaaagttgc agatccacaa aactaacagg |
| 2881 | ataattgggc aaataaatta catataaaca cacacaatct atatatgtat atacaatgct |
| 2941 | atatagatat gtatttatta tatcataaac tacagtaggt aactttaagg atttcttcct |
| 3001 | atccttgtac aatgacatga atgtctttct ttgaaaactg caatgtatgt atgtttcaag |
| 3061 | gttatttaac agtgtactat ggttttatat cttgacttgc cttgtacatc tttcaattct |
| 3121 | ggaatatctg tgtctaagca caatatcttc acactgtgct gtattgctgc tgaactaaat |
| 3181 | gcacttttcc ccacatatgg ggcactggct tcaaacaatt cagttcagta tcattacttt |
| 3241 | taatctcatc tttcctttct tggtagttgt taatacagtt atggaaaaga ggcacattgc |
| 3301 | atagaagcca ttggggagt= cagtggaagt tctgraagat gtgcatgtac tatttgatgc |
| 3361 | gttttctttg cttcactgct tttaatactt agcagtattg ttggtctaag tcaatttgat |
| 3421 | tattgaggag tctcagagca aggtgcgttc tagatgtcat cctaaaaaac acttcatata |
| 3481 | taattaatca ctattttgta taattacata ttgctgcttg tgtgtttttt tttttttcca |
| 3541 | tttagttggg cgttgtgttt tacacaaaac cattcttgaa ttaaggctat gatattaaga |
| 3601 | tagaaatttg gactgttgtt ctgcttttcc tggcactcaa attcatgact agttttgagg |
| 3661 | tcaaacctat gttcgtaatg agagatttta taaggatcaa ctaagaaatg gaaggcaggt |
| 3721 | gaagatataa aaccctagaa tgcttaaatg tgctgtaaaa ctattgtaga tgtcactgga |
| 3781 | ttttaccaag taatatcctt tctttttttt ttccccccat ctgctgtggc ttttcagtta |
| 3841 | aaattttgtt tataaaagga atttgtttat tacagctcta ccta |

(SEQ ID NO: 113)
MSSSLGKEKDSKEKDPKVPSAKEREKEAKASGGFGKESKEKEPKTKGKDAKDG
KKDSSAAQPGVAFSVDNTIKRPNPAPGTRKKSSNAEVIKELNKCREENSMRLDLSKRSI
HILPSSIKELTQLTELYLYSNKLQSLPAEVGCLVNLMTLALSENSLTSLPDSLDNLKKLR
MLDLRHNKLREIPSVVYRLDSLTTLYLRFNRITTVEKDIKNLSKLSMLSIRENKIKQLPAE
IGELCNLITLDVAHNQLEHLPKEIGNCTQITNLDLQHNELLDLPDTIGNLSSLSRLGLRYN
RLSAIPRSLAKCSALEELNLENNNISTLPESLLSSLVKLNSLTLARNCFQLYPVGGPSQFS
TIYSLNMEHNRINKIPFGIFSRAKVLSKLNMKDNQLTSLPLDFGTWTSMVELNLATNQL
TKIPEDVSGLVSLEVLILSNNLLKKLPHGLGNLRKLRELDLEENKLESLPNEIAYLKDLQ
KLVLTNNQLTTLPRGIGHLTNLTHLGLGENLLTHLPEEIGTLENLEELYLNDNPNLHSLP
FELALCSKLSIMSIENCPLSHLPPQIVAGGPSFIIQFLKMQGPYRAMV

[0090] An amino acid sequence for the protein (S100 calcium-binding protein A13 (S100A13)) encoded by the S100A13 gene that is a regulator of T cell exhaustion/dysfunction resistance is available from the UniPROT database at accession no. Q99584 or accession number NP_001019381, NP_001019382, NP_001019383, NP_001019384 or NP_005970, cDNA NM_001024210, NM_001024211, NM_001024212. NM_001024213 or NM_005979 with gene location at Chr 1: 153.62-153.63 Mb.

| (SEQ ID NO: 61) | |
|---|---|
| MAAEPLTELEESIETVVTTFFTFARQEGRKDSLSVNEFKELVTQ | |
| QLPHLLKDVGSLDEKMKSLDVNQDSELKFNEYWRLIGELAKEIRKKKDLKIRKK | |
| (SEQ ID NO: 62) | |
| 1 | ctcactaccg aaactcaccg aaggaaacag acgccagtgc tcctcccggg gctgccacca |
| 61 | cggctccggc aggcgggccg gggaccggcc gaacctgagt tgacggtgga ggggctcggg |
| 121 | ttagctagat gggcggttgg ttagatgcgt aagcggtagt atgcgagctc agttcgttgt |
| 181 | tgctggttgg ctgtctagtc ggccgatccg tctgctcacc cggcctgccc tttcctgcct |
| 241 | ttcgtctgca gcggccgcca gctcctgctc ggtgtccaaa acaaaatggc cgccacgtcc |
| 301 | agtgcttgtc tgaccggcta aaatggcgtc tacgcaatta cgtcaggcgt cagatccgcg |
| 361 | cacgactaga gggcgggaaa gatttgagct acgcctgcgc agagttgaga agctgatgtc |
| 421 | tcctcgactt ccaactggaa ccttgaaccc ccacatttct ggaccttgag cattcctcaa |
| 481 | gtaggaagat gtaatgcacc ttgacctctt tctaaataag acacttcccc cattcctcaa |
| 541 | agttgagagt gaacagtctt cacgtctcca cccacttcca gatcccagag gagacagaca |
| 601 | tcggatggct gttacctcct cctaaaatgt ctgcatttac ccagataatc ttccaatgga |
| 661 | aatccatggt tcaagtgcca cctcttcagg aaagccatct gacttcaatc aggtcagccc |
| 721 | tgacaaaggt cagctagccc cttgaggaca tcagctttgg cctcagggtc ctaatggcag |
| 781 | cagaaccact gacagagcta gaggagtcca ttgagaccgt ggtcaccacc ttcttcacct |
| 841 | ttgcaaggca ggagggccgg aaggatagcc tcagcgtcaa cgagttcaaa gagctggtta |
| 901 | cccagcagtt gccccatctg ctcaaggatg tgggctctct tgatgagaag atgaagagct |
| 961 | tggatgtgaa tcaggactcg gagctcaagt tcaatgagta ctggagattg attggggagc |
| 1021 | tggccaagga aatcaggaag aagaaagacc tgaagatcag gaagaagtaa agccgcctgg |
| 1081 | ctgagatggg gtgggcaggg cagagctgat cagggccgag cagaaccgca ctcttcccaa |
| 1141 | ataaagcttc ctccttgaaa cacaaa |

[0091] An amino acid sequence for the protein (Adapter protein CIKS) encoded by the TRAF3IP2 gene that is a regulator of T cell exhaustion/dysfunction resistance is available from the UniPROT database at accession no. 043734 or accession number NP_001157753, NP_001157755, NP_671733 or NP_679211, cDNA NM_001164281, NM 001164282, NM_001164283, NM_147200 or NM_147686 with gene location at Chr 6: 111.56-111.61 Mb.

| (SEQ ID NO: 63) | |
|---|---|
| MPPQLQETRMNRSIPVEVDESEPYPSQLLKPIPEYSPEEESEPP | |
| APNIRNMAPNSLSAPTMLHNSSGDFSQAHSTLKLANHQRPVSRQVTCLRTQVLEDSED | |
| SFCRRHPGLGKAFPSGCSAVSEPASESVVGALPAEHQFSFMEKRNQWLVSQLSAASPD | |
| TGHDSDKSDQSLPNASADSLGGSQEMVQRPQPHRNRAGLDLPTIDTGYDSQPQDVLGI | |
| RQLERPLPLTSVCYPQDLPRPLRSREFPQFEPQRYPACAQMLPPNLSPHAPWNYHYHC | |
| PGSPDHQVPYGHDYPRAAYQQVIQPALPGQPLPGASVRGLHPVQKVILNYPSPWDHEE | |
| RPAQRDCSFPGLPRHQDQPHHQPPNRAGAPGESLECPAELRPQVPQPPSPAAVPRPPS | |
| NPPARGTLKTSNLPEELRKVFITYSMDTAMEVVKFVNFLLVNGFQTAIDIFEDRIRGI | |
| DIIKWMERYLRDKTVMIIVAISPKYKQDVEGAESQLDEDEHGLHTKYIHRMMQIEFIK | |
| QGSMNFRFIPVLFPNAKKEHVPTWLQNTHVYSWPKNKKNILLRLLREEEYVAPPRGPL | |
| PTLQVVPL | |
| (SEQ ID NO: 64) | |
| 1 | gttcttctac ttacctgggc ccggagaagg tggagggaga cgagaagccg ccgagagccg |
| 61 | actaccctcc gggcccagtc tgtctgtccg tggtggatct aagcctcatc tgtatcctct |
| 121 | tgtgatggcg tgaaggaaag ccatggcaga tttccagcct ggtgatgctg tacagaacac |
| 181 | aggtggcctg cttccatgcc tcctcagctt caagaaacta gaatgaaccg aagcattcct |
| 241 | gtggaggttg atgaatcaga accataccca agtcagttgc tgaaaccaat cccagaatat |
| 301 | tccccggaag aggaatcaga accacctgct ccaaatataa ggaacatggc acccaacagc |
| 361 | ttgtctgcac ccacaatgct tcacaattcc tccggagact tttctcaagc tcactcaacc |
| 421 | ctgaaacttg caaatcacca gcggcctgta tcccggcagg tcacctgcct gcgcactcaa |
| 481 | gttctggagg acagtgaaga cagtttctgc aggagacacc caggcctggg caaagctttc |
| 541 | ccttctgggt gctctgcagt cagcgagcct gcgtctgagt ctgtggttgg agccctccct |
| 601 | gcagagcatc agttttcatt tatggaaaaa cttaatcaat ggctggtatc tcagctttca |
| 661 | gcggcttctc ctgacactgg ccatgactca gacaaatcag accaaagttt acctaatgcc |
| 721 | tcagcagact ccttgggcgg tagccaggag atggtgcaac ggccccagcc tcacaggaac |
| 781 | cgagcaggcc tggatctgcc aaccatagac acgggatatg attcccagcc ccaggatgtc |
| 841 | ctgggcatca ggcagctgga aaggcccctg ccccccacct ccgtgtgtta cccccaggac |
| 901 | ctccccagac ctctcaggtc cagggagttc cctcagtttg aacctcagag gtatccagca |
| 961 | tgtgcacaga tgctgcctcc caatctttcc ccacatgctc catggaacta tcattaccat |
| 1021 | tgtcctggaa gtcccgatca ccaggtgcca tatggccatg actaccctcg agcagcctac |
| 1081 | cagcaagtga tccagccggc tctgcctggg cagcccctgc ctggagccag tgtgagaggc |
| 1141 | ctgcaccctg tgcagaaggt tatcctgaat tatcccagcc cctgggacca cgaagagagg |
| 1201 | cccgcacaga gagactgctc ctttccgggg cttccaaggc accaggacca gccacatcac |
| 1261 | cagccaccta atagagctgg tgctcctggg gagtccttgg agtgccctgc agagctgaga |
| 1321 | ccacaggttc cccagcctcc gtccccagct gctgtgccta gaccccctag caaccctcca |
| 1381 | gccagaggaa ctctaaaaac aagcaatttg ccagaagaat tgcggaaagt ctttatcact |
| 1441 | tattcgatgg acacagctat ggaggtggtg aaattcgtga actttttgtt ggtaaatggc |
| 1501 | ttccaaactg caattgacat atttgaggat agaatccgag gcattgatat cattaaatgg |
| 1561 | atggagcgct accttaggga taagaccgtg atgataatcg tagcaatcag ccccaaatac |
| 1621 | aaacaggacg tggaaggcgc tgagtcgcag ctggacgagg atgagcatgg cttacatact |
| 1681 | aagtacattc atcgaatgat gcagattgag ttcataaaac aaggaagcat gaatttcaga |
| 1741 | ttcatccctg tgctcttccc aaatgctaag aaggagcatg tgcccacctg gcttcagaac |
| 1801 | actcatgtct acagctggcc caagaataaa aaaaacatcc tgctgcggct gctgagagag |
| 1861 | gaagagtatg tggctcctcc acgggggcct ctgcccaccc ttcaggtggt tcccttgtga |
| 1921 | caccgttcat ccccagatca ctgaggccag gccatgtttg gggccttgtt ctgacagcat |
| 1981 | tctggctgag gctggtcggt agcactcctg gctggttttt ttctgttcct ccccgagagg |
| 2041 | ccctctggcc cccaggaaac ctgttgtgca gagctcttcc ccggagacct ccacacaccc |
| 2101 | tggctttgaa gtggagtctg tgactgctct gcattctctg cttttaaaaa aaccattgca |
| 2161 | ggtgccagtg tcccatatgt tcctcctgac agtttgatgt gtccattctg ggcctctcag |
| 2221 | tgcttagcaa gtagataatg taagggatgt ggcagcaaat ggaaatgact acaaacactc |
| 2281 | tcctatcaat cacttcaggc tacttttatg agttagccag atgcttgtgt atcctcagac |
| 2341 | caaactgatt catgtacaaa taataaaatg tttactcttt tgtaagatta tgttttactt |
| 2401 | atctcaaagg agatacatat aatttataat gatatgggca gttgcttcca gggacatcaa |
| 2461 | caaagctgct tagatataat attagataaa tataacagac cactctgtat taatggatta |
| 2521 | aagccagcta gttaaacaac cctttttaac cataatcatg gaagctttat tcttgcaata |
| 2581 | aagattttta ggctgggcgc agtgactcac acctgtaatc ccagcacttt gggaagctaa |
| 2641 | ggcaggcaga tcatttgagg tcaggagttt gagaccagcc tggccaacat ggtgaaaccc |
| 2701 | catctctgct aaaattacaa aaaagttagc cgggcatggt ggtgtgcacc tgtaatccca |
| 2761 | gctactcggg aggctgaggc aggagaatca cttgaacccg ggaggcagag gttgcagtga |
| 2821 | gccgagatca tgtcactgca ctctagcttg ggagacagag cgagactccg tctcaaaaaa |
| 2881 | caaacaaaca aataaaaaca cccattttta acaaaacaac tttatatagc atacagccat |
| 2941 | gattctaaat agtatgatta tggttctcag gatctgacta cataggtaaa aatatttgca |
| 3001 | tatgtgtatg aagtgttggg ggatgtaggc tagaattgta gtctgtgttc taattttggt |
| 3061 | tctaccacca attagctgta tgacctttag caagtccttt aacttttctt agattccagg |
| 3121 | gactcattta taaaatgaca tggacaaaag catccctaat cactctaaaa gatttgaagt |
| 3181 | ctaggaccta aattctaaat actcttttga ggagtgactg agttttcatt ttcataatta |
| 3241 | tgtctctcag aggacaaatt tacattttct taacagagac attttcttct tctttttttt |
| 3301 | tgtttgagac agagtctcgc tctgtcgtcc aggctggagt gcagtgctgc aatcttggct |
| 3361 | cactgcaacc tgcgcctcct gggttcaagt gattcttctg cctcaacctc ccaagtagct |
| 3421 | agacctatag gcgcctgcca ccatgcccag ctaatttttg tatttttagt agagacaggg |
| 3481 | tttcatattg gccagactgg tctcgaactc ctgaccttgt gatccgccca cctcggcctc |
| 3541 | ccaaagtgct gggattacag gtgtgagcca ccacacccag ccaacatttt cctcttttaa |
| 3601 | aaaatatctt ctcacgcctg taatcccagc acttugggag gctgaggcag gcggatcatg |
| 3661 | aggtcaggag atcaagacca tcctggctaa cacggtgaaa ctccatctct actaaaaata |
| 3721 | caaaaaaaat agccgggcgt ggtggcaggc gcctgtagtc ccagctactg gggaggctga |
| 3781 | ggcaggaaaa tggtgtcaac ccgggaggcg gagcttgcag tgagccgaga ttgcgccact |
| 3841 | gcactccagc ctgggcaata gagtgagact ccgtctcaaa aaaaaaaaaa aaaaaaaaaa |
| 3901 | cttcaacaat accctcaggc tgataatttt ggatatctat ctgtatctat atatcttgtt |
| 3961 | tacctggtct ccagaaaaag aacacataca catatccata tataaaatat gtatacatgt |
| 4021 | atcaaatcta cgtaaactat aaaggtggga tggccttaat tatggcccaa gctactaaga |
| 4081 | caatgaagac tttttggggc tgcaagctac tgcttccctt ctttatctac tagcctctta |
| 4141 | aacaaggctc acttgtgcta caagacagtc caccgttttg tttttttttt cttttttttg |
| 4201 | agacagggtc tcactctttc ccaggctgca gtacagtgac acagtctcag ctcactgcag |
| 4261 | ctttgacctt gccgggctca ggtgaccctt acacttcagc ctcccaagta gcagggacta |
| 4321 | taggtgtgca ccaacatgct tggttaattt ttgtattttt tgtagagaca gggttttgcc |
| 4381 | atgttgtcca ggctagtctc gaattcctgg gctcaagtga ttcacctgcc ttggcctccc |
| 4441 | aaagtgctag gattacagat gggagccacc acgcccagcc cagtccagct cttatatgta |
| 4501 | gcacagggaa aggacaaata cttgtcaact ataaataaga aacattgcta atgcattgca |
| 4561 | aagaacacta gtttcattta ctttataact tagatgtcta ctgggtgaga cgaatgtctt |
| 4621 | tgttctttaa aaaataggaa aagagaagaa aaactagcat aacataagta ctcatttgta |
| 4681 | agactttctg acatgtaaca ttagttccgt agttctgaga cctggtagaa ctgactttca |
| 4741 | tatttggata acctggaaaa cacccaaaca caaacttcaa gtcttctttc tcttttttca |
| 4801 | ttatcttttt tagtctgagg tgacaccatc attaaggatt cgacacccgt ttgtaaataa |
| 4861 | aatgacatca gcaattactc tgaaatgttt ctagtttgca aagacttagc aatgtgatgt |
| 4921 | tattaaccct tcctcccttc agagacctgt cctaagctct gaaccactca ttccttccac |
| 4981 | tcttcttacc ccaggtggtt gatgagcagt ggtccctggt gttccacaaa gagtcattaa |
| 5041 | agtgttacag ctggtagcac tggtagcaaa aaaacaaacc aaaaagtaca cacagacaca |
| 5101 | cacacacaca cgcacacata cacacacaca cgcacttggc caagtgacaa aagcttggcc |
| 5161 | cctgaaattt ctatgagatc cgatgaccac caacatcaaa gcattttttt tttttttttt |
| 5221 | ttgagacgta gtctcgctct gtcacccagg ctagagtgca gtggtgcaat cacagctcac |
| 5281 | tgcaacctcc acctcccggg ttcaagcgat tctcctgcct cagcctctcg agtagctgtg |
| 5341 | actacaggca cctgccacca tgcccggcta attttttgta tttttagtag agacggggtt |
| 5401 | tcaccgtgtt agccaggatg gtcttgatct cctgacctcg tgatccatcc gcctcggcct |
| 5461 | cccaaattgc tgggattaca ggcatgagcc accacgcccg gcccatcaaa ggaattgtaa |
| 5521 | caactatttg agagcactga caataagatt aacactcggt tgatttagat gttatgctgg |
| 5581 | tcctcaggca ttcatcttta gatatttttg gggtggaagt ggggtagggc tgacttagta |
| 5641 | aaaataacct cttagcccaa aggctttatt cagacttaca ccgatttgag gggtgggttt |
| 5701 | gtggaatgca aggttaggtt cttacctaat atttgatgac taatttagaa ttttaaatgt |
| 5761 | aattttaaat tttagtgact ggtttcaaat ctattttaac ttctagattg ttcaaagagg |
| 5821 | tctcagtaca tggctacaat caaagtatta gactagctat ttctcagctc agtgctcaga |
| 5881 | aaaattatta ctgttgatac ctttttcttt gtttcctgtt aaataaatca cctctttaaa |
| 5941 | gaca |

[0092] An amino acid sequence for the protein (Adapter protein CIKS) encoded by the TMEM167B gene that is a regulator of T cell exhaustion/dysfunction resistance is available from the UniPROT database at accession no. 043734, cDNA NM_020141 with gene location at Chr 1: 109.09-109.10.

| (SEQ ID NO: 114) | |
|---|---|
| 1 | cttccagtca cctcggcccg gatcgggaag tgtcaagcgg gcgctccccc atctccgccg |
| 61 | ctattaccac tgaacccgga ccccctaccc aggtccaggg ccagccgcca tgacgaacgt |
| 121 | gtactccttg gatgggattc tggtgtttgg tttgctcttt gtttgcacct gtgcctactt |
| 181 | caagaaagta cctcgtctca aaacctggct gctatcagag aagaagggtg tttggggtgt |
| 241 | gttttacaaa gccgctgtga ttggaaccag gctgcatgct gctgtggcaa ttgcttgtgt |
| 301 | tgtaatggcc ttttacgtcc tgtttataaa atgaattcca aagcacccaa gtcatcaact |
| 361 | gccaaccaag gggacgggga tgaagaacct gttggagacc tgaacccagt gtaggagagt |
| 421 | tcagctgaaa tcatcggtcc ccaggatgac accacagcat ctgcccctgc tatatgtggg |
| 481 | gaaaactcat ggtcacgaac attatttatg cttcagggga ctacagaaag ccagcttcct |
| 541 | ttgatctatg tgtaaatcag tccttggcag agtgcatata atgtccggat aaattacacc |
| 601 | cctcggtgat aagattacat acctccttca taaaaacctg tcatcctgtt ttgttcttca |
| 661 | gctcctcatc aggatctttt caaactgagg ctcattaggg aaggaactag gctgtgttca |
| 721 | gacttctttt gaagagagag aattttcaag acttcttttc actctttgat ttggatctgg |
| 781 | caaattgggg aggggatgct gggtgggaaa cagttatgaa atgccaagaa attctttggc |
| 841 | tttagaaatt tatctttcat gtacccatcc gggaacataa aagagaggca tagtgctcat |
| 901 | tgcaaaaaga gaacagatga agtagctgtg ttatgtgctg gtatcttgag agttttgcca |
| 961 | agaaaatctg ggcctacata aaatttgaga attatctgty tgatgagacc agaaagcagt |
| 1021 | ggcttagaca agaaaaaatc tttctgttca ccagtatcct caaatggaga cttcacttga |
| 1081 | tcagatggta tatgaaaaat gaatcaacta ttgctatttc gtaaaacctt tttatatttt |
| 1141 | ctaaatttac ttagtgctaa atactgttac tcagctttaa atgccacgac taggggaaaa |
| 1201 | agaaactatt gaagaaataa ttgtttagta tatttgcagt tggggtagaa gaaagaaatc |
| 1261 | tagtatattg attcatatac tagtaaattc atctagtata agaacttgtg atgttagatt |
| 1321 | gaagttttgt catcttataa aagacaacaa acttattttc tgtttaagtc tgagtgttat |
| 1381 | ggcaattttt agttgattac ttatttttct tagccaaatt ttaattttct tcatattgca |
| 1441 | ttgctcttta gttgtctctg gaaattctat ttactttaag gacatgagaa attcaaatga |
| 1501 | gagaagttgc tgatattcat cagtgtgttt ggacagttca tagggtccac aaatcaaatg |
| 1561 | aggttgtttc ctgaagtaga agaaaacaga actttgcaat tgatactgaa gtactttgcc |
| 1621 | atggagttag taactcctga gcagaccatt ttagatggct cagcatttgg caggaagact |
| 1681 | tctccattcc ctgcttatat ctatggaagg atcagctgtt ggatgtctag aacttctcta |
| 1741 | tttaaaaaaa aagagtaggc ctaaaattaa attattataa gcaagcatag acatgggtct |
| 1801 | tccagttgaa ttgtccatta ccgtaaaact taatggtgga caagttagct gtggttgatt |
| 1861 | cctgtgtggc agtaaattgt cttctgtctg cttactccaa ataataaaag ctgctaggaa |
| 1921 | gtttagattt tgaaataggc agtttaatgc tttgagggtt tctagaaata cagaaagtca |
| 1981 | tcaagtaaac actgcatgtc taatcatctc agagttgtgg ctgttatctc ttcaggaatt |
| 2041 | ggtccacagg gtaaatttca acaattcata cgttttccat tgtcatttct gaggaccttt |
| 2101 | gagatgagag aaaggaaatc tagtggaaca ggaaagagag ttacaccttg tgggtgtgag |
| 2161 | tttgggacct gttggcagaa gggaatgtca ctccctggaa acaggttcag catgtttgca |
| 2221 | cttgttattt tgtagcttta atgatttttg ttttctaata gggcaaatgt ctctaagctt |
| 2281 | ggtgtttaga gctgcttcat attttaaact agttccattc cacagttcta gttcaaacca |
| 2341 | gtttttacag cctcctgggt gggtcgtctt gacccaaact cttgtgttgt tacattttga |
| 2401 | gaggttttca taccagaatg taccaaaaag tgcacaaggt aaaggtaatt tacagccaga |
| 2461 | aacaaatata catttgtttc atttcttgac tttccctaag cagataagca gaaacttgtt |
| 2521 | taactcatta ctttgtttga tgtgtattac atatttttga ctaaaagtta tagaatgtta |
| 2581 | ttcctctggg ggaatctttt acaggtggag gaatggggat agcagtattg cctcagattc |
| 2641 | aaactggcat caccataaac cctgtaggcc agggtggaat gaagtcagct cctttttata |
| 2701 | gttgaaatac aattttttat tcaccattgt ctgcacaaat ccttgaaaat aaaccttttt |
| 2761 | ttccctaca |

(SEQ ID NO: 65)
MTNVYSLDGILVFGLLFVCTCAYFKKVPRLKTWLLSEKKGVWGVFYKAAVIGTRLHAAVAIACVVMAFYVLFIK

[0093] An amino acid sequence for the protein (TSR2 ribosome maturation factor) encoded by the TSR2 gene that is a regulator of T cell exhaustion/dysfunction resistance is available from the UniPROT database at accession no. Q969E8 or accession number NP_001333718, NP 001333719, NP_001333720, NP_001333721 or NP_477511, cDNA NM_001346789, NM_001346790, NM_001346791, NM_001346792 or NM_058163 with gene location at Chr X: 54.44-54.45 Mb.

| (SEQ ID NO: 67) | |
|---|---|
| MAGAAEDARALFRAGVCAALEAWPALQIAVENGFGGVHSQEKAK | |
| WLGGAVEDYFMRNADLELDEVEDFLGELLTNEFDTVVEDGSLPQVSQQLQTMFHHFQR | |
| GDGAALREMASCITQRKCKVTATALKTARETDEDEDDVDSVEEMEVTATNDGAATDGV | |
| CPQPEPSDPDAQTIKEEDIVEDGWTIVRRKK | |
| (SEQ ID NO: 68) | |
| 1 | gtggactggg gccggataat ggcgggcgct gcagaagatg cgcgagctct tctccgggct |
| 61 | ggggtctgcg cggccctgga ggcctggccg gccttgcaga tcgctgtgga gaatggcttc |
| 121 | gggggtgtgc acagccagga gaaggccaag tggctggggg gtgcagtgga ggattacttc |
| 181 | atgcgcaatg ctgacttgga gctagatgag gtggaagact tccttggaga gctgttgacc |
| 241 | aacgagtttg atacagttgt ggaagacggg agtctgcccc aggtgagcca gcaactgcag |
| 301 | accatgttcc accacttcca gaggggtgat ggggctgctc tgagggagat ggcctcctgc |
| 361 | atcactcaga gaaaatgcaa ggtcacagcc actgcactta agacagctag agagactgat |
| 421 | gaggatgaag atgatgtgga cagtgtggaa gagatggagg tcacagctac gaatgatggg |
| 481 | gctgctacag atggggtctg cccccagcct gaaccctctg atccagacgc tcagactatt |
| 541 | aaggaagagg atatagtgga agatggctgg accattgtcc ggagaaaaaa atgagtgggg |
| 601 | atgattggaa atggctttgg gcccttattt gctgttctaa gagttgtctg taggggtttt |
| 661 | ttttttgagg attgcagacc tgtggactgg ttaccccatc tccaccctct cccctgttcc |
| 721 | tctgtctggc tccctccagg gcaaggaaaa cctagggtcc ttggtcttgg gggtgggggg |
| 781 | accttttcca gcatattccc ctgggccttt agttaacatc cgagtgacga agccgggttc |
| 841 | cccagtacag tgtcttttgg gtgcggtcat tgtgaggaag gggatgagtg agtgtgggtg |
| 901 | tggctggagg aggagctaga tgccggtgga cagtgggcag gtggatttgg ggaggagagg |
| 961 | atcagcagca gcagcagtac tcagtgatag ggggctggct gggtcaggaa tggtgagatg |
| 1021 | aacatgcaag tggaagagag aatagttgaa aatgtgaatg aaagtagctc tggagcctct |
| 1081 | cccttacccc accccacaca cacgcaacag ctctgtaccc ctgcccagaa cttggaacct |
| 1141 | cccaggaatg ctgccttcct tcagcccagc ctccagtcct gggttccctc aggaattcga |
| 1201 | agaccttggc taggtggtga gcttggaaga gctgggcttt gttttctgtc tcctctaacc |
| 1261 | tctttcctta ctccttatcc catcccattt gagttcaggg gtgaggctta agatcttaat |
| 1321 | aaataatacc ttactgctta atctgtggct tgacctgtga gtagtagcct tagaatcagc |
| 1381 | cttctgggag ctcagcttca gagtttacaa gggagcagtt tctgggccca ccctagcagc |
| 1441 | ctggtacttt ggacaaccaa acagatgaac gaacggagca cagcagtgct atgaaagtta |
| 1501 | ctgtaagcct gaaataaact gtatttttct taaaaaaaaa aaaacacaca aaaaaacaca |
| 1561 | aaaaactgag tatccattgt cctcccccct gtttccctgt cctgcccgct ggccctgcca |
| 1621 | tgggtctgga cgataaaata ctgggtagcc ttggggccgg gtagaagctg taagccatgg |
| 1681 | gagaggcagg agaggtctag ttgccacccc acgtggagtt gtacgtgtga agacactggc |
| 1741 | tgaggaggca gggctgggtc ggggccccag ggtcagtggc agagctggca cttgaatcca |
| 1801 | ggtctcctac ctctggtgct ttgtggggaa ctgggtggag gcaggatctg tggtagggta |
| 1861 | ttgagggatg agggagaaaa acgacctaat tcaggtagga ctggcaacgg ctcccaccct |
| 1921 | ccctggggac agggattaat aaaaattgac atcactgtag gaatatattt tttaaaagcc |
| 1981 | cacgttttgt gaaaagatga attaaaaaac ccaagaccca gcattcggga ttgaaagtgc |
| 2041 | ccgtgatggg agttcaagta ttgactgagc tgggagggaa ggggctagag cccccaatca |
| 2101 | gacatgggca actagagtgt ggggtggggg ctcccagttt gtcccaaacc ctctaggtct |
| 2161 | tgtctcgggt ctggggggat tcggggggtt cagcagtggc tcctaaagca gccaccggtg |
| 2221 | cctcctccat ctccctgtcc tcagacagtg tgggccccgg gcagaacgtg tcccctcggc |
| 2281 | ccgcccggcc aagcacagcc atccagcgtc gctgtagttc ctctgtctca gggctgaagt |
| 2341 | accagctgag gtggctctgg gtgatcttga agacatgcct tctgtcaggc cgctcccctg |
| 2401 | cctcgggcgg tcccacctcg aagccaatga ggggcaggct gcgctgggct ttcacatcct |
| 2461 | ggcgggagga gggacagagc tggggccacc ttggggctag acctttcccc cgccccagct |
| 2521 | tctaactggt tttgcatatg ctctgtcttc agtcccctac tcaggaactc ccctactcag |
| 2581 | gaaccttccg tggctccagt gttatcaaca ggaacatgtc agaactgggg ctaaaatgca |
| 2641 | ggctggttta aatacctgtc tccccccacc cccgcctctt ctcacaaaac tgctgggcta |
| 2701 | gtctctttag cataccaaat aatgttttca ggcctttgtc tatgctattg cccctatctg |
| 2761 | catacttttt tttttttttt tttttgagac agagtcttgc cctgttgccc aggctggagt |
| 2821 | gcagtggcat gaacttggct cactgcaacc tctacctccc aggttcaagc aattctcctg |
| 2881 | cctcagcttc ctgagtagct gggactacag gcacacgtca ccacgccagg ctaatttttg |
| 2941 | tatttttagt agagacgggg tttcaccatg ttggccaggc tggtcttgaa ctcctgatct |
| 3001 | caggtgagcc acctgcctcg gcctctcaga gtgctgggat tacaggcgtg agccactgcg |
| 3061 | ctcggtccca tctgcatact cttacccact ccaaattgga cctagcagtt ccccatctct |
| 3121 | actccttcca ggaagccagg cccacaactc atcctggttt tccctacata ccacaaccac |
| 3181 | tccttgtctc tagccagtct ttgtctctca agggctgggg ttctgatttc ctcttagaga |
| 3241 | taggctcacc ttatcttcca aggctcacct tatcttccaa ggccaaggag aggtcaagga |
| 3301 | ctggatctgg ctttgccagg tggctgaaag gacccgaagg agtaggatgc atacctgagg |
| 3361 | ggctccgtag atatacagca ccaagggttc attttcaggg accacgaacc atgccttgtg |
| 3421 | ccatcctttg ccacccttct ccatgtagtg caggaagctg cagatgacgc tgttctctgc |
| 3481 | agccactgag gcctgtttct gtggccagag acaccgggca tcaatgttga cagaaggcct |
| 3541 | agcctggctc ctcctagctt taatacctcc tcagtgtagg gactgctatt cctatctcag |
| 3601 | atgaagacgc tcaagctcag gtggcaggag tgatttgtcc agtgccaccc agtgaatcag |
| 3661 | ctagagctga gattcaaagc taggttcgtc tgcctcattt gggcaacggc tgctgcctct |
| 3721 | acaggccagt ggaaggagtg tgcggatctc aggcattctt tcttcagtca gagcattcat |
| 3781 | tcctcaagcc attcacacat ttaggcctca tgcttttttc tgtctttcat cacatccatt |
| 3841 | tcctacactc attgagaggt aatctagcat tgtggtttta agggggtatg tgggtggtta |
| 3901 | atgaagtctg gcttagaatc ccagctctag atgaaaatgt attgacttgg agagcaaaga |
| 3961 | gagctgatgt gagaattaaa tgaattaata tatgcaaagt gcttagaata gttcctggca |
| 4021 | cagagtaagt actcttttaa gtgttaaata aatacctaga tttgttttta aaaaaa |

[0094] An amino acid sequence for the protein (Proto-oncogene vav) encoded by the VAV1 gene 60 that is a regulator of T cell exhaustion/dysfunction resistance is available from the UniPROT database at accession no. P15498 or accession number NP_001245135, NP_001245136 or NP_005419, cDNA NM_001258206, NM_001258207 or NM_005428 with gene location at Chr 19: 6.77-6.86 Mb.

| (SEQ ID NO: 69) | |
|---|---|
| MELWRQCTHWLIQCRVLPPSHRVTWDGAQVCELAQALRDGVLLC | |
| QLLNNLLPHAINLREVNLRPQMSQFLCLKNIRTFLSTCCEKFGLKRSELFEAFDLFDV | |
| QDFGKVIYTLSALSWTPIAQNRGIMPFPTEEESVGDEDIYSGLSDQIDDTVEEDEDLY | |
| DCVENEEAEGDEIYEDLMRSEPVSMPPKMTEYDKRCCCLREIQQTEEKYTDTLGSIQQ | |
| HFLKPLQRFLKPQDIEIIFINIEDLLRVHTHFLKEMKEALGTPGAANLYQVF KYKER | |
| FLVYGRYCSQVESASKHLDRVAAAREDVQMKLEECSQRANNGRFTLRDLLMVPMQRVL | |
| KYHLLLQELVKHTQEAMEKENLRLALDAMRDLAQCVNEVKRDNETLRQITNFQLSIEN | |
| LDQSLAHYGRPKIDGELKITSVERRSKMDRYAFLLDKALLICKRRGDSYDLKDFVNLH | |
| SFQVRDDSSGDRDNKKWSHMFLLIEDQGAQGYELFFKTRELKKKWMEQFEMAISNIYP | |
| ENATANGHDFQMFSFEETTSCKACQMLLRGTFYQGYRCHRCRASAHKECLGRVPPCGR | |
| HGQDFPGTMKKDKLHRRAQDKKRNELGLPKMEVFQEYYGLPPPPGAIGPFLRLNPGDI | |
| VELTKAEAEQNWWEGRNTSTNEIGWFPCNRVKPYVHGPPQDLSVHLWYAGPMERAGAE | |
| SILANRSDGTFLVRQRVKDAAEFAISIKYNVEVKHKIMTAEGLYRITEKKAFRGLTE | |
| LVEFYQQNSLKDCFKSLDTTLQFPFKEPEKRTISRPAVGSTKYFGTAKARYDFCARDR | |
| SELSLKEGDIIKILNKKGQQGWWRGEIYGRVGWFPANYVEEDYSEYC | |
| (SEQ ID NO: 70) | |
| 1 | agcactagct gtcgctccac aggcgagcag ggcaggcgtg cgggcgggtg ggtggtggag |
| 61 | gctgcgaggg tgcacggccg gccctgggca ggcggtagcc atggagctgt ggcgccaatg |
| 121 | cacccactgg ctcatccagt gccgggtgct gccgcccagc caccgcgtga cctgggatgg |
| 181 | ggctcaggtg tgtgaactgg cccaggccct ccgggatggt gtccttctgt gtcagctgct |
| 241 | taacaacctg ctaccccatg ccatcaacct gcgtgaggtc aacctgcgcc cccagatgtc |
| 301 | ccagttcctg tgccttaaga acattagaac cttcctgtcc acctgctgtg agaagttcgg |
| 361 | cctcaagcgg agcgagctct tcgaagcctt tgacctcttc gatgtgcagg attttggcaa |
| 421 | ggtcatctac accctgtctg ctctgtcctg gaccccgatc gcccagaaca gggggatcat |
| 481 | gcccttcccc accgaggagg agagtgtagg tgatgaagac atctacagtg gcctgtccga |
| 541 | ccagatcgac gacacggtgg aggaggatga ggacctgtat gactgcgtgg agaatgagga |
| 601 | ggcggaaggc gacgagatct atgaggacct catgcgctcg gagcccgtgt ccatgccgcc |
| 661 | caagatgaca gagtatgaca agcgctgctg ctgcctgcgg gagatccagc agacggagga |
| 721 | gaagtacact gacacgctgg gctccatcca gcagcatttc ttgaagcccc tgcaacggtt |
| 781 | cctgaaacct caagacattg agatcatctt tatcaacatt gaggacctgc ttcgtgttca |
| 841 | tactcacttc ctaaaggaga tgaaggaagc cctgggcacc cctggcgcag ccaatctcta |
| 901 | ccaggtcttc atcaaataca aggagaggtt cctcgtctat ggccgctact gcagccaggt |
| 961 | ggagtcagcc agcaaacacc tggaccgtgt ggccgcagcc cgggaggacg tgcagatgaa |
| 1021 | gctggaggaa tgttctcaga gagccaacaa cgggaggttc accctgcggg acctgctgat |
| 1081 | ggtgcctatg cagcgagttc tcaaatatca cctccttctc caggagctgg tgaaacacac |
| 1141 | gcaggaggcg atggagaagg agaacctgcg gctggccctg gatgccatga gggacctggc |
| 1201 | tcagtgcgtg aacgaggtca agcgagacaa cgagacactg cgacagatca ccaatttcca |
| 1261 | gctgtccatt gagaacctgg accagtctct ggctcactat ggccggccca agatcgacgg |
| 1321 | ggaactcaag atcacctcgg tggaacggcg ctccaagatg gacaggtatg ccttcctgct |
| 1381 | cgacaaagct ctactcatct gtaagcgcag gggagactcc tatgacctca aggactttgt |
| 1441 | aaacctgcac agcttccagg ttcgggatga ctcttcagga gaccgagaca acaagaagtg |
| 1501 | gagccacatg ttcctcctga tcgaggacca aggtgcccag ggctatgagc tgttcttcaa |
| 1561 | gacaagagaa ttgaagaaga agtggatgga gcagcttgag atggccatct ccaacatcta |
| 1621 | tccggagaat gccaccgcca acgggcatga cttccagatg ttctcctttg aggagaccac |
| 1681 | atcctgcaag gcctgtcaga tgctgcttag aggtaccttc tatcagggct accgctgcca |
| 1741 | tcggtgccgg gcatctgcac acaaggagtg tctggggagg gtccctccat gtggccgaca |
| 1801 | tgggcaagat ttcccaggaa ctatgaagaa ggacaaacta catcgcaggg ctcaggacaa |
| 1861 | aaagaggaat gagctgggtc tgcccaagat ggaggtgttt caggaatact acgggcttcc |
| 1921 | tccaccccct ggagccattg gaccctttct acggctcaac cctggagaca ttgtggagct |
| 1981 | cacgaaggct gaggctgaac agaactggtg ggagggcaga aatacatcta ctaatgaaat |
| 2041 | tggctggttt ccttgtaaca gggtgaagcc ctatgtccat ggccctcctc aggacctgtc |
| 2101 | tgttcatctc tggtacgcag gccccatgga gcgggcaggg gcagagagca tcctggccaa |
| 2161 | ccgctcggac gggactttct tggtgcggca gagggtgaag gatgcagcag aatttgccat |
| 2221 | cagcattaaa tataacgtcg aggtcaagca cattaaaatc atgacagcag aaggactgta |
| 2281 | ccggatcaca gagaaaaagg ctttccgggg gcttacggag ctggtggagt tttaccagca |
| 2341 | gaactctcta aaggattgct tcaagtctct ggacaccacc ttgcagttcc ccttcaagga |
| 2401 | gcctgaaaag agaaccatca gcaggccagc agtgggaagc acaaagtatt ttggcacagc |
| 2461 | caaagcccgc tatgacttct gcgcccgaga ccgatcagag ctgtcgctca aggagggtga |
| 2521 | catcatcaag atccttaaca agaagggaca gcaaggctgg tggcgagggg agatctatgg |
| 2581 | ccgggttggc tggttccctg ccaactacgt ggaggaagat tattctgaat actgctgagc |
| 2641 | cctggtgcct tggcagagag acgagaaact ccaggctctg agcccggcgt gggcaggcag |
| 2701 | cggagccagg ggctgtgaca gctcccggcg ggtggagact ttgggatgga ctggaggagg |
| 2761 | ccagcgtcca gctggcggtg ctcccgggat gtgccctgac atggttaatt tataacaccc |
| 2821 | cgatttcctc ttgggtcccc tcaagcagac ggggctcaag ggggttacat ttaataaaag |
| 2881 | gatgaagatg ga |

[0095] An amino acid sequence for the protein (Zinc finger protein 211) encoded by the ZNF211 gene that is a regulator of T cell exhaustion/dysfunction resistance is available from the UniPROT database at accession no. Q13398, cDNA NM_006385 with gene location at Chr 19: 57.63-57.64.

| (SEQ ID NO: 115) | |
|---|---|
| 1 | agggcgggac ttgtggcgtc ttcgcagcgg tcattttggc tgccctcccg gaggtccgtt |
| 61 | ctgtctgtca gccgctttgg tacgctgcat cgggatcgaa gtgacggacc gtgaaggcgc |
| 121 | gagagtcagg tctgagggtc gggggcagag ccgcccgcga ggccggcctg gggatagcga |
| 181 | tgctcgggtt ccccccgggt cgcccgcagc tcccggtcca gctccgccca cagactcgga |
| 241 | tggcgaccgc actgagggac ccggcttcgg ttcccatagc tacagaggtg cttttcaaac |
| 301 | ttacacaggg aagtgtgacc tttgaagatg tggccgtgta cttctcctgg gaggaatggg |
| 361 | atctccttga tgaggctcag aaacacctgt acttcgatgt gatgctggag aactttgcac |
| 421 | ttacgtcctc cctgggttgt tggtgtggag tggaacatga ggaaacacct tctgaacaga |
| 481 | gaatttctgg agaaagagtg ccacagttca ggacttccaa agaaggttca tcttcccaga |
| 541 | atgccgactc ctgtgaaata tgttgcctgg tcttgagaga tattttgcac ttggctgaac |
| 601 | accaaggaac aaactgcggg cagaaactac acacatgtgg aaaacaattc tacatcagtg |
| 661 | caaatcttca acagcaccag aggcagcaca ttacagaggc acctttcaga agttatgtgg |
| 721 | acactgcctc gtttacacag agttgcatag tccatgtgtc ggagaaaccc tttacctgca |
| 781 | gggagatcag gaaagacttc ctggccaaca tgaggtttct ccatcaagac gccactcaaa |
| 841 | caggggagaa gccaaataac agtaacaagt gtgcggtggc cttttacagt ggaaaaagtc |
| 901 | atcacaactg gggaaaatgc agtaaagcct ttagccacat agacacactt gttcaggacc |
| 961 | agagaatcct cactagagaa ggactttttg agtgcagtaa atgtgggaaa gcatgtacgc |
| 1021 | gaagatgtaa cctcattcag caccagaaag tccacagtga agaaaggcct tatgaatgca |
| 1081 | atgaatgtgg aaaattcttt acctactact ccagtttcat tatacatcag agagttcata |
| 1141 | ctggagaaag gccttatgcg tgccctgaat gtgggaaatc gtttagtcag atatacagcc |
| 1201 | tcaatagcca taggaaagtt cacactggag aaaggcctta tgaatgtggg gaatgtggga |
| 1261 | aatcttttag ccaaaggtcc aacctcatgc agcatcgcag agttcacact ggagaaaggc |
| 1321 | cttatgaatg cagcgaatgt gggaaatctt ttagccaaaa ctttagcctg atctaccacc |
| 1381 | agagagttca cactggagaa agacctcatg agtgcaatga atgtggaaaa tcctttagcc |
| 1441 | gaagctccag cctcattcac caccggagac ttcacactgg agaaagaccc tatgagtgca |
| 1501 | gtaaatgtgg gaagtcattc aagcaaagct ccagcttcag ttcacatcgg aaagtccaca |
| 1561 | caggggaaag gccttatgtg tgtggggaat gtgggaaatc ctttagccat agctccaacc |
| 1621 | ttaagaacca ccagagagtt cacactggag aaagacctgt tgagtgcagt gaatgtagca |
| 1681 | aatcctttag ctgtaaatct aacctcatta aacacctgag agttcacact ggagaaaggc |
| 1741 | cttatgagtg cagtgaatgt gggaaatcct ttagccaaag ttctagcctc attcaacacc |
| 1801 | gcagagttca cacgggaaaa aggccttatc agtgcagtca atgtgggaaa tcctttggct |
| 1861 | gcaaatctgt cctcattcaa caccagagag ttcacattgg agaaaagcct tagctgtact |
| 1921 | gagaatatgc aatttccttt tagtgtaatt atactgaagg agtacacctg tgagagagac |
| 1981 | aagtacctga tttggaagcc ccaacatcta aggatataca gtgggcggat tccccttaag |
| 2041 | ttccaggtat gtgttacact ttctaacatg ccatttagaa agtgttagac tttctcacct |
| 2101 | gccatttatg gctcttgccg tttatgtcac tgacagtttc tgaggcagaa gccgtatcat |
| 2161 | gtctaccacc tgtgaggtcc acacagtgtg tatcatttac ctcctgaacc tgctcaagga |
| 2221 | agcagacctc tgcttctccc catttgctag aagaaatcat gaatagtctg agtcttcctc |
| 2281 | tctgacaagt tagggcatgg acttgaccca gctttgtgcc agagaaccca atatgagtgt |
| 2341 | tgttggcagc ttgccaagaa ggactgtctt tttcaagaca tactggtttc atgtgacacc |
| 2401 | tccatggatt tttttccagc ctctaagtca ccaacttggg aactgcttgt ctcacgttgc |
| 2461 | tttgtttttt acaataataa aagcattatt atttaagcta cctttatctt ggcatttgat |
| 2521 | tcactctttg aggtggttca aaaacagaat cgggccctgc cagctttaca gagtaaacac |
| 2581 | ctttggaggg agagggaggt gtcatatgcc tcagtgacaa cagtataatg gaaaaataca |
| 2641 | actgtctttc cagctttggc ctaatctgaa tttgaattat tgcccaaggc cttctaggaa |
| 2701 | atactgcagg atattatggt cttaattcgt ggactggatg caaggatttt ttgtgggctc |
| 2761 | aaaggacacc ctgaggaagt gggaaattgt gacaaattcc attgcttctg ggaacaagat |
| 2821 | gaattttgtt gttattcaca agggttatta catactgccc agcactgttg aggcagtcta |
| 2881 | cccccagtgc tgccaaggag ccaagtgccc caatacaatt tagtaggcta ctgtcactgt |
| 2941 | aaaatgatgg gggaaccata attggtgtgg aaacactggg ttactaggga gtgaaggaga |
| 3001 | ctgcagcaaa ctagatggaa tgtgctcctt gtaatatgtt ctagtaattg tgcaggatca |
| 3061 | gtgtgtacag acattcttag aatttccagg catgtgtatt ttttgtagct gaggtgactg |
| 3121 | tcaaaaaata ataaacaacc taaaggtttt gtgtattcca atagcctttc tgggatgtgc |
| 3181 | acctcaagaa cattgctgca taggccagga aaacaagcat agaaagaagg ggcgggggat |
| 3241 | gtccttccag gaatgtgact ttgtaaccta ccatcatcct gtgtttaaat gaattcaaat |
| 3301 | cagtttcatt gattaccagt atttgctgcc cactgaggca aggtgtccct ccaaggtcat |
| 3361 | caggaaagag agttaatgta gggttaccaa acctagtcaa aaacacatta taccatcatt |
| 3421 | ataattatta caatgaacat atcagtcacc tcggatttac ctcaggcctt tttctaagct |
| 3481 | ctccctcccc tctctggccc tcaaggcaac cattgattta taccttcatt tataataggt |
| 3541 | ttgtttgtat tttctataat atatgatttt attaataaaa tgtctttttt tccagtttca |
| 3601 | ttcatgatgc ataattattt tgagattctt caatggagct tatatgtggt ggtcattctt |
| 3661 | tttattgctg agtggtatat tttttatgga tatactattt gttatccatt tgtttataag |
| 3721 | catttaggtt ttatctagtt ttggctatta caaataaagc tgctagaaat gta |

(SEQ ID NO: 71)
MLGFPPGRPQLPVQLRPQTRMATALRDPASGSVTFEDVAVYFSWEEWDLLDEAQKHLYFDVMLENFALTSSLGCWCG
VEHEETPSEQRISGERVPQFRTSKEGSSSQNADSCEICCLVLRDILHLAEHQGTNCGQKLHTCGKQFYISANLQQHQ
RQHITEAPFRSYVDTASFTQSCIVHVSEKPFTCREIRKDFLANMRFLHQDATQTGEKPNNSNKCAVAFYSGKSHHNW
GKCSKAFSHIDTLVQDQRILTREGLFECSKCGKACTRRCNLIQHQKVHSEERPYECNECGKFFTYYSSFIIHQRVHT
GERPYACPECGKSFSQIYSLNSHRKVHTGERPYECGECGKSFSQRSNLMQHRRVHTGERPYECSECGKSFSQNFSLI
YHQRVHTGERPHECNECGKSFSRSSSLIHHRRLHTGERPYECSKCGKSFKQSSSFSSHRKVHTGERPYVCGECGKSF
SHSSNLKNHQRVHTGERPVECSECSKSFSCKSNLIKHLRVHTGERPYECSECGKSFSQSSSLIQHRRVHTGKRPYQC
SQCGKSFGCKSVLIQHQRVHIGEKP

### Genes Downregulated for T Cell Resistance

[0096] The following genes are downregulated in T cells resistant to exhaustion/dysfunction (see Table 1): CCNC, ELOB, ELOC. IGFL4, MED1, MED12, MED13, MN1, MED19, MEOX1, MOCS3, NQO2, PRDM14, SYCE1L, SYTL2, SRRD, SPIN1, UBE2E1, ARHGAP5. ARIH1, ARIH2, ATF7IP, ATF7IP2, ATXN7L3, BORCS8, CAND1, CASP3, CBFB, CDK13, CDKN2A, CFAP54, CISH, COPS7B, CPSF4L, CUL5, CUTA, DCUN1D3, DDA1, GABARAPL1, 50 KDM5C, KIAA1551, KRTAP10-9, MADD, MAPKAP1, MED23, MED24, MYB, MYO5A, NFKBIA, PAK2, PDCL, PIK3R5, PTEN. RASA2, RNASE9, RNF7. RPS6KA1. SBNO2, SND1, ST8SIA5, TNIP1, TRIM56, TSPEAR, UBAP2L, UBE2F, UBE2L3, WDFY1, ZBTB21, and ZMYND8.

[0097] Sequences and other information relating to these genes, and their encoded proteins, is available, for example from the NCBI and UniPROT databases, which are incorporated by reference.

[0098] A few examples of protein sequences encoded by some of the genes detected as regulators of T cell exhaustion/dysfunction resistance are provided.

[0099] An amino acid sequence for the protein (Cyclin-C) encoded by the CCNC gene that is a regulator of T cell exhaustion/dysfunction resistance is available from the UniPROT database at accession no. P24863 or accession number NP 001013417, NP_005181 or NP_001350466, cDNA NM_001013399, NM_005190 or NM_001363537 with gene location at Chr 6: 99.54-99.57 Mb.

| (SEQ ID NO: 73) | |
|---|---|
| MAGNFWQSSHYLQWILDKQDLLKERQKDLKFLSEEEYWKLQIFF | |
| TNVIQALGEHLKLRQQVIATATVYFKRFYARYSLKSIDPVLMAPTCVFLASKVEEFGV | |
| VSNTRLIAAATSVLKTRFSYAFPKEFPYRMNHILECEFYLLELMDCCLIVYHPYRPLL | |
| QYVQDMGQEDMLLPLAWRIVNDTYRTDLCLLYPPFMIALACLHVACVVQQKDARQWFA | |
| ELSVDMEKILEIIRVILKLYEQWKNFDERKEMATILSKMPKPKPPPNSEGEQGPNGSQ | |
| NSSYSQS | |
| (SEQ ID NO: 74) | |
| 1 | gtcgccgccg cggagcggag tcgagccgag ctgatttgat cgaggagcgc ggttaccgga |
| 61 | cgggctgggt ctatggtcgc tccgcgggcc gctccgccgg ctggtgcttt tttatcaggg |
| 121 | caagctgtgt tccatggcag ggaacttttg gcagagctcc cactatttgc aatggatttt |
| 181 | ggataaacaa gatctgttga aggagcgcca aaaggattta aagtttctct cagaggaaga |
| 241 | atattggaag ttacaaatat tttttacaaa tgttatccaa gcattaggtg aacatcttaa |
| 301 | attaagacaa caagttattg ccactgctac ggtatatttc aagagattct atgccaggta |
| 361 | ttctctgaaa agtatagatc ctgtattaat ggctcctaca tgtgtgtttt tggcatccaa |
| 421 | agtagaggaa tttggagtag tttcaaatac aagattgatt gctgctgcta cttctgtatt |
| 481 | aaaaactaga ttttcatatg cctttccaaa ggaatttcct tataggatga atcatatatt |
| 541 | agaatgtgaa ttctatctgt tagaactaat ggattgttgc ttgatagtgt atcatcctta |
| 601 | tagacctttg ctccagtatg tgcaggacat gggccaagaa gacatgttgc ttccccttgc |
| 661 | atggaggata gtgaatgata cctacagaac ggatctttgc ctactgtatc ctcctttcat |
| 721 | gatagcttta gcttgcctac atgtagcctg tgttgtacag cagaaagatg ccaggcaatg |
| 781 | gtttgctgag ctttctgtgg atatggaaaa gattttggaa ataatcaggg ttattttaaa |
| 841 | actatatgag cagtggaaga atttcgatga gagaaaagag atggcaacca ttcttagtaa |
| 901 | gatgccaaaa ccaaaaccac ctccaaacag tgaaggagag cagggtccaa atggaagtca |
| 961 | gaactctagc tacagccaat cttaaaacat tccgaagaat tccatagtgg accacttgga |
| 1021 | aataaaccat tggacagatt tcagtaatgt cttcagtgga acacaaatga aaatgaatag |
| 1081 | cttgtttctg tcaagcatat tggaaagtga ttttattttt gcaaaataag tttttcttta |
| 1141 | atatgattct agtacataat tgattaaaat ctcttgatta taaatgtttg gaaaggttct |
| 1201 | aaggggacct acagacagac atacatagac atttcaaaat taatagcttt tgattagtat |
| 1261 | aatatttctt aatttggata ataaaaattg tagcttttta ttaagccagg aaacatgaag |
| 1321 | cataatttgt ttaaaattct ctttggtcat tgagggacca aaaaaggacg taaaatttac |
| 1381 | agtcaatcta tgagggtttt tttccctcca taagcttaac tttaaaactg tatttaagga |
| 1441 | atcaaatctt acaaaatcct ggaagatttt ggtaatgatg ttgataattt cagggaaatt |
| 1501 | aatcaagtac ctatattgat ttaaaagtgt atttrattca gtagtttgag gatcttgcca |
| 1561 | tggaagatac tagcccagcc tagcagaaaa gtgcaatatg tatagcatac tttgacattt |
| 1621 | taaacatgat agtccataac cattttgaaa tgctgggcaa actacatgaa gttatttata |
| 1681 | attaattcac agctaatcag gcattttgaa agcttaattg gattcaaaaa ccataatgtt |
| 1741 | ggaatttggt aaaattttaa tgttgatttt tactgtgaaa aggtttttat aagatataca |
| 1801 | caccctagtt taatgttgtg tcttggtgtg gatttacaga tttactacag gtattctgaa |
| 1861 | ccaggaacac aatcaggttt caggccagtt tgatactggc tgtccttaat tctaatatga |
| 1921 | gagtaggaca tcatactaaa tgttatgtca gtgggactgt actgtctgtg gaacttagca |
| 1981 | aattaatcat tttcttcaga cttgaaggag agtgataaat aaaatttgga gtcataggat |
| 2041 | attgatgcac aatttaagga ttaaacattt ttaatcaatt gtggatgatg gcttattaaa |
| 2101 | tgttgacttc ctagtataaa actgcaagaa taaaagtaac ttctccagct gta |

[0100] An amino acid sequence for the protein (Elongin B) encoded by the ELOB gene that is a regulator of T cell exhaustion/dysfunction resistance is available from the UniPROT database at accession no. Q15370 or accession number NP_009039 or NP_996896, cDNA NM_207013 or NM_007108 with gene location at Chr 16: 2.77-2.78 Mb.

| (SEQ ID NO: 75) | |
|---|---|
| MDVFLMIRRHKTTIFTDAKESSTVFELKRIVEGILKRPPDEQRL | |
| YKDDQLLDDGKTLGECGFTSQTARPQAPATVGLAFRADDTFEALCIEPFSSPPELPDV | |
| MKPQDSGSSANEQAVQ | |
| (SEQ ID NO: 76) | |
| 1 | gcggctgcgc cggcgcgtcg aggggagagg cagcagccgc gatggacgtg ttcctcatga |
| 61 | tccggcgcca caagaccacc atcttcacgg acgccaagga gtccagcacg gtgttcgaac |
| 121 | tgaagcgcat cgtcgagggc atcctcaagc ggcctcctga cgagcagcgg ctgtacaagg |
| 181 | atgaccaact cttggatgat ggcaagacac tgggcgagtg tggcttcacc agtcaaacag |
| 241 | cacggccaca ggccccagcc acagtggggc tggccttccg ggcagatgac acctttgagg |
| 301 | ccctgtgcat cgagccgtt= tccagcccgc cagagctgcc cgatgtgatg aagccccagg |
| 361 | actcgggaag cagtgccaat gaacaagccg tgcagtgagg acccccaaga ggcccatttc |
| 421 | ccccaataaa agagatttgg gagtctgcct ggttgctgcc tctttttccc gcccctccct |
| 481 | gggatgggtc ccactccctg tgggctcctt ttggggcttg tgcttggcag ttcctgtgct |
| 541 | gtcctgtctc ccagatcctg agaccctggc tgagaacttg gcccagcctg ctgcttaaag |
| 601 | gcaccatggg gacctgggtt gccctgagac ccaagccatt gttagcagct agccagccac |
| 661 | accaaccacg ccagggggag gaaagggaag gactgggaga gacacaaaga ccagagccag |
| 721 | cctcagggac aagagattcc agttttaggc ctttctcctt ctaagtgccc cccaccccca |
| 781 | tagcctgcat gtccactccc agacgatggc caagagcaga aacacaagct ggagccagtg |
| 841 | tcctggtttg acagcatgt= caacgaggga accccaagac ggacccacac aggtccaccc |
| 901 | acgctggggg ctgtaatcac ggagggaagt ggctgccccc ttaacacacc tttaataaac |
| 961 | agtctacaga ccca |

[0101] An amino acid sequence for the protein (Elongin C) encoded by the ELOC gene that is a regulator of T cell exhaustion/dysfunction resistance is available from the UniPROT database at accession no. Q15369 or accession number NP_001191786, NP 001191787, NP_001191788, NP_001191789, or NP_001191790, cDNA NM 001204857, NM_001204858, NM_001204859, NM_001204860 or NM_001204861 with gene location at Chr 8: 73.94-73.97 MB.

| (SEQ ID NO: 77) | |
|---|---|
| MDGEEKTYGGCEGPDAMYVKLISSDGHEFIVKREHALTSGTIKA | |
| MLSGPGQFAENETNEVNFREIPSHVLSKVCMYFTYKVRYTNSSTEIPEFPIAPEIALE | |
| LLMAANFLDC | |
| (SEQ ID NO: 78) | |
| 1 | cagacggaag tgagcgacac actctgcgtc ctcgcctcac caggaaacta ctaaagttcc |
| 61 | tggggaagca aagtagaatt tcataagaac aaaatggatg gagaggagaa aacctatggt |
| 121 | ggctgtgaag gacctgatgc catgtatgtc aaattgatat catctgatgg ccatgaattt |
| 181 | attgtaaaaa gagaacatgc attaacatca ggcacgataa aagccatgtt gagtggccca |
| 241 | ggtcagtttg ctgagaacga aaccaatgag gtcaatttta gagagatacc ttcacatgtg |
| 301 | ctatcgaaag tatgcatgta ttttacgtac aaggttcgct acactaacag ctccaccgag |
| 361 | attcctgaat tcccaattgc acctgaaatt gcactggaac tgctgatggc tgcgaacttc |
| 421 | ttagattgtt aaataaaata aattataata aactgttaac tcttttcagt atttaatacc |
| 481 | tgtagttcag ttagtaactt tttcatatat agcatgttgc ctgtatgcag ttgaactata |
| 541 | taaagttcat tgcaaagcag attatcttgt ttttttgcat agcaatcaaa gttgaaattt |
| 601 | gtttgctaca tcaacaaatt aaggacattt tcacaaactg agaaataaac aaatatgcca |
| 661 | attcgtaggt ggttttgcct tatcctttga atgtgactta aaatcagcaa tgatgatata |
| 721 | gtaaatactg aaatttaggt gtaaatcaat acgttctaca gggaaataat gaggctaagt |
| 781 | atttttatgt ttttagtggt tttttagaaa cctaatctta tagccgccat tagcattact |
| 841 | agagttatgc aaataattgc attataaaca tgtttataac ttagccaaaa cattgatttt |
| 901 | tataactctc caagtatgag ttgaaatttc ttatgtcttt tgataaactg cagtattctt |
| 961 | taagtgtact ttgtcctttt gtttattgct acaatttaag aactttattt aaaaacaatt |
| 1021 | ttggaaggtt actaggtaca gcttttgcag aagaaactga actgtagcca gatggtcagc |
| 1081 | aagtaaacta catgacttag agttcttgtg cattatacat tttgggtaat tcaaagtact |
| 1141 | gtatttgcat tgactataaa gcgtcgtttg caatatttat tcttccttca tagtcccttg |
| 1201 | ttgtgattat acttccagt= gtttaaatgt attttaaaag actcactatt aactttattc |
| 1261 | agatcttaaa agctacacct ttttgaacta ttccagtctt tctccatcca attagaatgt |
| 1321 | tatggaataa catgtgaaga gatacagtga aaatcatatt ataatgcatt gaagatatcc |
| 1381 | tacatgaatt atcttctatt aaaatatgtc ccaataaata tacccataat cagtgggtct |
| 1441 | tctactgaaa tcaagctcat tcagcttttc tattaagcag ccaaaaaatt ttttgaaaaa |
| 1501 | atatgacagc atcattcctt atgcatgggg aaagaagcac tcgagatggg tttagtattg |
| 1561 | tctttatctc agaggtggaa caaagttgtc attatagggt ctataaactt aagtctccag |
| 1621 | cttatttgag actggcttaa tatggctgag cccggtggct catgcctgta atcccagcac |
| 1681 | tttcagagga cgaggcgggt agatcacttg aggccaggag tttgagacca gcctggccac |
| 1741 | catggcaaaa ccccatctct accaaaaatg caaaaattag ctaggccatg gtggcacacg |
| 1801 | cctgtaatcc cagctacttg tgaggctgag gcatgagaat cgcttgaacc tgggaggtgg |
| 1861 | aggtggcagt gagccgagat cgcaccactg cactccagcc tgggtgacag agcgagactg |
| 1921 | tctcaaaaaa aaaaaaaaaa aaa |

[0102] An amino acid sequence for the protein (Insulin growth factor-like family member 4) encoded by the IGFL4 gene that is a regulator of T cell exhaustion/dysfunction resistance is available from the UniPROT database at accession no. Q6B9Z1, cDNA NM_001002923.3.

| (SEQ ID NO: 79) | |
|---|---|
| MVPRISAAIFIFELLGSNSEGVTDLRLWLCQPAPRCGEWTYNPLEQCCDDGVILDLNQTRLCGSSCTFWPCFQHCCL | |
| ESLGSQNQTVVRFKVPGMKPDCKSSPITRICAQEYHPKSPVSRSDLI | |
| (SEQ ID NO: 80) | |
| 1 | ccactgctgc tccctcgtcc gctgctctga agcctaaccc atggtgccca gaatttctgc |
| 61 | tgccatcttc atttttgaac ttttgggttc aaactcagaa ggagtcacag atcttagact |
| 121 | gtggctatgc cagccagcgc ccaggtgcgg ggagtggacc tacaacccct tggagcagtg |
| 181 | ctgtgatgac ggtgtcatcc tagacttgaa ccagacccgg ctctgcggct ccagctgcac |
| 241 | cttctggccc tgcttccagc actgctgcct ggagtctttg ggctctcaga accagacagt |
| 301 | tgtgaggttc aaggtcccag gcatgaagcc agattgcaag tcctccccta tcaccaggat |
| 361 | ctgtgcccag gaataccacc caaaaagccc tgtgtcaaga tctgacctca tctagactgt |
| 421 | tctggggtag cagagtcaca gatcactcta gaatctaata cttggtaatt atactgcatt |
| 481 | gattttgttg ttgttgtgac agagtttcac tctgtccccc aggctggagt gcaaataagc |
| 541 | aacttcagca aagtctcagg atacaaaatc aatgtacaaa aatcacaagc attcttatac |
| 601 | accaacaaca gacaaacaga gagccaaatc atgagtgaac tcccattcac aattgcttca |
| 661 | cagagaataa aatacctagg aatccaactt acaagggatg tgaaggacct cttcaaggag |
| 721 | aactacaaac cactgctcaa ggaaataaaa gaggatacaa acaaatggaa gaacattcca |
| 781 | tgctcatggg taggaagaat caatatcgtg aaaatggcca tactgcccaa ggtaatttac |
| 841 | agattcaatg ccatccccat caagctacca atgactttct tcacagaatt ggaaaaaact |
| 901 | actttaaagt tcatatggaa ccaaaaaaga gccctcatcg ccaagtcaat cctaagccaa |
| 961 | aagaacaaag ctggaggcat cacactacct gacttcaaac tatactataa ggctacagta |
| 1021 | accaaaacag catggtactg gtaccaaaac agagatatag atcaatggaa cagaacagag |
| 1081 | ccctcagaaa taacgccgca tatctacaac tatctgatct ttgac |

[0103] An amino acid sequence for the protein (Mediator of RNA polymerase II transcription subunit 1) encoded by the MED1 gene that is a regulator of T cell exhaustion/dysfunction resistance is available from the UniPROT database at accession no Q15648 or accession number NP_004765. cDNA NM_004774 with gene location at Chr 17: 39.4-39.45 Mb.

| (SEQ ID NO: 81) | |
|---|---|
| MKAQGETEESEKLSKMSSLLERLHAKFNQNRPWSETIKLVRQVM | |
| EKRVVMSSGGHQHLVSCLETLQKALKVTSLPAMTDRLESIARQNGLGSHLSASGTECY | |
| ITSDMFYVEVQLDPAGQLCDVKVAHHGENPVSCPELVQQLREKNFDEFSKHLKGLVNL | |
| YNLPGDNKLKTKMYLALQSLEQDLSKMAIMYWKATNAGPLDKILHGSVGYLTPRSGGH | |
| LMNLKYYVSPSDLLDDKTASPIILHENNVSRSLGMNASVTIEGTSAVYKLPIAPLIMG | |
| SHPVDNKWTPSFSSITSANSVDLPACFFLKFPQPIPVSRAFVQKLQNCTGIPLFETQP | |
| TYAPLYELITQFELSKDPDPIPLNHNMRFYAALPGQQHCYFLNKDAPLPDGRSLQGTL | |
| VSKITFQHPGRVPLILNLIRHQVAYNTLIGSCVKRTILKEDSPGLLQFEVCPLSESRF | |
| SVSFQHPVNDSLVCVVMDVQDSTHVSCKLYKGLSDALICTDDFIAKVVQRCMSIPVTM | |
| RAIRRKAETIQADTPALSLIAETVEDMVKKNLPPASSPGYGMTTGNNPMSGTTTPTNT | |
| FPGGPITTLFNMSMSIKDRHESVGHGEDFSKVSQNPILTSLLQITGNGGSTIGSSPTP | |
| PHHTPPPVSSMAGNTKNHPMLMNLLKDNPAQDFSTLYGSSPLERQNSSSGSPRMEICS | |
| GSNKTKKKKSSRLPPEKPKHQTEDDFQRELFSMDVDSQNPIFDVNMTADTLDTPHITP | |
| APSQCSTPPTTYPQPVPHPQPSIQRMVRLSSSDSIGPDVTDILSDIAEEASKLPSTSD | |
| DCPAIGTPLRDSSSSGHSQSTLFDSDVFQTNNNENPYTDPADLIADAAGSPSSDSPTN | |
| HFFHDGVDFNPDLLNSQSQSGFGEEYFDESSQSGDNDDFKGFASQALNTLGVPMLGGD | |
| NGETKFKGNNQADTVDFSIISVAGKALAPADLMEHHSGSQGPLLTTGDLGKEKTQKRV | |
| KEGNGTSNSTLSGPGLDSKPGKRSRTPSNDGKSKDKPPKRKKADTEGKSPSHSSSNRP | |
| FTPPTSTGGSKSPGSAGRSQTPPGVATPPIPKITIQIPKGTVMVGKPSSHSQYTSSGS | |
| VSSSGSKSHHSHSSSSSSSASTSGKMKSSKSEGSSSSKLSSSMYSSQGSSGSSQSKNS | |
| SQSGGKPGSSPITKHGLSSGSSSTKMKPQGKPSSLMNPSLSKPNISPSHSRPPGGSDK | |
| LASPMKPVPGTPPSSKAKSPISSGSGGSHMSGTSSSSGMKSSSGLGSSGSLSQKTPPS | |
| SNSCTASSSSFSSSGSSMSSSQNQHGSSKGKSPSRNKKPSLTAVIDKLKHGVVTSGPG | |
| GEDPLDGQMGVSTNSSSHPMSSKHNMSGGEFQGKREKSDKDKSKVSTSGSSVDSSKKT | |
| SESKNVGSTGVAKIIISKHDGGSPSIKAKVTLQKPGESSGEGLRPQMASSKNYGSPLI | |
| SGSTPKHERGSPSHSKSPAYTPQNLDSESESGSSIAEKSYQNSPSSDDGIRPLPEYST | |
| EKHKKHKKEKKKVKDKDRDRDRDKDRDKKKSHSIKPESWSKSPISSDQSLSMTSNTIL | |
| SADRPSRLSPDFMIGEEDDDLMDVALIGN | |
| (SEQ ID NO: 82) | |
| 1 | gaagttccgt tggggaagat ggcggcggcc tcgagcaccc ttctcttctt gccgccgggg |
| 61 | acttcagatt gatccttccc gggaagagta gggactgctg gtgccctgcg tcccgggatc |
| 121 | ccgagccaac ttgtttcctc cgttagtggt ggggaagggc ttatcctttt gtggcggatc |
| 181 | tagcttctcc tcgccttcag gatgaaagct cagggggaaa ccgaggagtc agaaaagctg |
| 241 | agtaagatga gttctctcct ggaacggctc catgcaaaat ttaaccaaaa tagaccctgg |
| 301 | agtgaaacca ttaagcttgt gcgtcaagtc atggagaaga gggttgtgat gagttctgga |
| 361 | gggcatcaac atttggtcag ctgtttggag acattgcaga aggctctcaa agtaacatct |
| 421 | ttaccagcaa tgactgatcg tttggagtcc atagcaagac agaatggact gggctctcat |
| 481 | ctcagtgcca gtggcactga atgttacatc acgtcagata tgttctatgt ggaagtgcag |
| 541 | ttagatcctg caggacagct ttgtgatgta aaagtggctc accatgggga gaatcctgtg |
| 601 | agctgtccgg agcttgtaca gcagctaagg gaaaaaaatt ttgatgaatt ttctaagcac |
| 661 | cttaagggcc ttgttaatct gtataacctt ccaggggaca acaaactgaa gactaaaatg |
| 721 | tacttggctc tccaatcctt agaacaagat ctttctaaaa tcgcaattat gtactggaaa |
| 781 | gcaactaatg ctggtccctt ggataagatt cttcatggaa gtgttggcta tctcacacca |
| 841 | aggagtgggg gtcatttaat gaacctgaag tactatgtct ctccttctga cctactggat |
| 901 | gacaagactg catctcccat cattttgcat gagaataatg tttctcgatc tttgggcatg |
| 961 | aatgcatcag tgacaattga aggaacatct gctgtgtaca aactcccaat tgcaccatta |
| 1021 | attatggggt cacatccagt tgacaataaa tggacccctt ccttctcctc aatcaccagt |
| 1081 | gccaacagtg ttgatcttcc tgcctgtttc ttcttgaaat ttccccagcc aatcccagta |
| 1141 | tctagagcat ttgttcagaa actgcagaac tgcacaggaa ttccattgtt tgaaactcaa |
| 1201 | ccaacttatg cacccctgta tgaactgatc actcagtttg agctatcaaa ggaccctgac |
| 1261 | cccatacctt tgaatcacaa catgagattt tatgctgctc ttcctggtca gcagcactgc |
| 1321 | tatttcctca acaaggatgc tcctcttcca gatggccgaa gtctacaggg aacccttgtt |
| 1381 | agcaaaatca cctttcagca ccctggccga gttcctctta tcctaaatct gatcagacac |
| 1441 | caagtggcct ataacaccct cattggaagc tgtgtcaaaa gaactattct gaaagaagat |
| 1501 | tctcctgggc ttctccaatt tgaagtgtgt cctctctcag agtctcgttt cagcgtatct |
| 1561 | tttcagcacc ctgtgaatga ctccctggtg tgtgtggtaa tggatgtgca ggactcaaca |
| 1621 | catgtgagct gtaaactcta caaagggctg tcggatgcac tgatctgcac agatgacttc |
| 1681 | attgccaaag ttgttcaaag atgtatgtcc atccctgtga cgatgagggc tattcggagg |
| 1741 | aaagctgaaa ccattcaagc cgacacccca gcactgtccc tcattgcaga gacagttgaa |
| 1801 | gacatggtga aaaagaacct gcccccggct agcagcccag ggtatggcat gaccacaggc |
| 1861 | aacaacccaa tgagtggtac cactacacca accaacacct ttccgggggg tcccattacc |
| 1921 | accttgttta atatgagcat gagcatcaaa gatcggcatg agtcggtggg ccatggggag |
| 1981 | gacttcagca aggtgtctca gaacccaatt cttaccagtt tgttgcaaat cacagggaac |
| 2041 | ggggggtcta ccattggctc gagtccgacc cctcctcatc acacgccgcc acctgtctct |
| 2101 | tcgatggccg gcaacaccaa gaaccacccg atgctcatga accttcttaa agataatcct |
| 2161 | gcccaggatt tctcaaccct ttatggaagc agccctttag aaaggcagaa ctcctcttcc |
| 2221 | ggctcacccc gcatggaaat atgctcgggg agcaacaaga ccaagaaaaa gaagtcatca |
| 2281 | agattaccac ctgagaaacc aaagcaccag actgaagatg actttcagag ggagctattt |
| 2341 | tcaatggatg ttgactcaca gaaccctatc tttgatgtca acatgacagc tgacacgctg |
| 2401 | gatacgccac acatcactcc agctccaagc cagtgtagca ctcccccaac aacttaccca |
| 2461 | caaccagtac ctcaccccca acccagtatt caaaggatgg tccgactatc cagttcagac |
| 2521 | agcattggcc cagatgtaac tgacatcctt tcagacattg cagaagaagc ttctaaactt |
| 2581 | cccagcacta gtgatgattg cccagccatt ggcacccctc ttcgagattc ttcaagctct |
| 2641 | gggcattctc agagtaccct gtttgactct gatgtctttc aaactaacaa taatgaaaat |
| 2701 | ccatacactg atccagctga tcttattgca gatgctgctg gaagccccag tagtgactct |
| 2761 | cctaccaatc atttttttca tgatggagta gatttcaatc ctgatttatt gaacagccag |
| 2821 | agccaaagtg gttttggaga agaatatttt gatgaaagca gccaaagtgg ggataatgat |
| 2881 | gatttcaaag gatttgcatc tcaggcacta aatactttgg gggtgccaat gcttggaggt |
| 2941 | gataatgggg agaccaagtt taagggcaat aaccaagccg acacagttga tttcagtatt |
| 3001 | atttcagtag ccggcaaagc tttagctcct gcagatctta tggagcatca cagtggtagt |
| 3061 | cagggtcctt tactgaccac tggggactta gggaaagaaa agactcaaaa gagggtaaag |
| 3121 | gaaggcaatg gcaccagtaa tagtactctc tcggggcccg gattagacag caaaccaggg |
| 3181 | aagcgcagtc ggaccccttc taatgatggg aaaagcaaag ataagcctcc aaagcggaag |
| 3241 | aaggcagaca ctgagggaaa gtctccatct catagttctt ctaacagacc ttttacccca |
| 3301 | cctaccagta caggtggatc taaatcgcca ggcagtgcag gaagatctca gactccccca |
| 3361 | ggtgttgcca caccacccat tcccaaaatc actattcaga ttcctaaggg aacagtgatg |
| 3421 | gtgggcaagc cttcctctca cagtcagtat accagcagtg gttctgtgtc ttcctcaggc |
| 3481 | agcaaaagcc accatagcca ttcttcctcc tcttcctcat ctgcttccac ctcagggaag |
| 3541 | atgaaaagca gtaaatcaga aggttcatca agttccaagt taagtagcag tatgtattct |
| 3601 | agccaggggt cttctggatc tagccagtcc aaaaattcat cccagtctgg ggggaagcca |
| 3661 | ggctcctctc ccataaccaa gcatggactg agcagtggct ctagcagcac caagatgaaa |
| 3721 | cctcaaggaa agccatcatc acttatgaat ccttctttaa gtaaaccaaa catatcccct |
| 3781 | tctcattcaa ggccacctgg aggctctgac aagcttgcct ctccaatgaa gcctgttcct |
| 3841 | ggaactcctc catcctctaa agccaagtcc cctatcagtt caggttctgg tggttctcat |
| 3901 | atgtctggaa ctagttcaag ctctggcatg aagtcatctt cagggttagg atcctcaggc |
| 3961 | tcgttgtccc agaaaactcc cccatcatct aattcctgta cggcatcttc ctcctccttt |
| 4021 | tcctcaagtg gctcttccat gtcatcctct cagaaccagc atgggagttc taaaggaaaa |
| 4081 | tctcccagca gaaacaagaa gccgtccttg acagctgtca tagataaact gaagcatggg |
| 4141 | gttgtcacca gtggccctgg gggtgaagac ccactggacg gccagatggg ggtgagcaca |
| 4201 | aattcttcca gccatcctat gtcctccaaa cataacatgt caggaggaga gtttcagggc |
| 4261 | aagcgtgaga aaagtgataa agacaaatca aaggcttcca cctccgggag ttcagtggat |
| 4321 | tcttctaaga agacctcaga gtcaaaaaat gtggggagca caggtgtggc aaaaattatc |
| 4381 | atcagtaagc atgatggagg ctcccctagc attaaagcca aagtgacttt gcagaaacct |
| 4441 | ggggaaagta gtggagaagg gcttaggcct caaatggctt cttctaaaaa ctatggctct |
| 4501 | ccactcatca gtggttccac tccaaagcat gagcgtggct ctcccagcca tagtaagtca |
| 4561 | ccagcatata ccccccagaa tctggacagt gaaagtgagt caggctcctc catagcagag |
| 4621 | aaatcttatc agaatagtcc cagctcagac gatggtatcc gaccacttcc agaatacagc |
| 4681 | acagagaaac ataagaagca caaaaaggaa aagaagaaag taaaagacaa agatagggac |
| 4741 | cgagaccggg acaaagaccg agacaagaaa aaatctcata gcatcaagcc agagagttgg |
| 4801 | tccaaatcac ccatctcttc agaccagtcc ttgtctatga caagtaacac aatcttatct |
| 4861 | gcagacagac cctcaaggct cagcccagac tttargattg gggaggaaga tgatgatctt |
| 4921 | atggatgtgg ccctgattgg gaattaggaa ccttatttcc taaaagaaac agggccagag |
| 4981 | gaaaaaaaac tattgataag tttataggca aaccaccata aggggtgagt cagacaggtc |
| 5041 | tgatttggtt aagaatccta aatggcatgg ctttgacatc aagctgggtg aattagaaag |
| 5101 | gcatatccag accctattaa agaaaccaca gggtctgatt ctggttacca ggaagtcttc |
| 5161 | tttgttcctg tgccagaaag aaagttaaaa tacttgctta agaaagggag gggggtggga |
| 5221 | ggggtgtagg gagagggaag ggagggaaac agttatgtgg gaaatattca tatatatttt |
| 5281 | cttctccctt tttccatttt taggccatgt tttaaactca ttttagtgca tgtatatgaa |
| 5341 | gggctgggca gaaaatgaaa aagcaataca ttccttgatg catttgcatg aaggttgttc |
| 5401 | aactttgttt gaggtagttg tccgtttgag tcatgggcaa atgaaggact ttggtcattt |
| 5461 | tggacactta agtaatgttt ggtgtctgtt tcttaggagt gactggggga gggaagatta |
| 5521 | ttttagctat ttatttgtaa tattttaacc ctttatctgt ttgtttttat acagtgtttc |
| 5581 | gttctaaatc tatgaggttt agggttcaaa atgatggaag gccgaagagc aaggcttata |
| 5641 | tggtggtagg gagcttatag cttgtgctaa tactgtagca tcaagcccaa gcaaattagt |
| 5701 | cagagcccgc ctttagagtt aaatataata gaaaaaccaa aatgatattt ttattttagg |
| 5761 | agggtttaaa tagggttcag agatcatagg aatattagga gttacctctc tgtggaggta |
| 5821 | ttgacttgta atctcatttt cctttcaaaa aaaaaaaaaa aagctaaggt ggcttgttgg |
| 5881 | gatgtaaaca tgttttcaga tgcagtaagg tttagtgtag gacagccttc ctgacccagt |
| 5941 | ggcatgaaaa ccattacagg attaatagtt ctcctacttc cacaatgtgc caaaagtctg |
| 6001 | catcccagca ttttgtttgc aggagaactg atgccattcc taagagctgg actcactgtt |
| 6061 | tctcttcatc acaaggagaa ggagtccaaa ctttaatcac tccactgtat gctccctgag |
| 6121 | ataaaacagt aaaaaatccg cagccatagt tcacttaaaa caatttcaag ctcacttttg |
| 6181 | aagtaatggg ggcctggaat gctaggtgag catgaagata aacccttgct actatgtagc |
| 6241 | aacccaattg gacctttttg gagaaatagg tctgagtctg gattctgggg gacatcaata |
| 6301 | agagcccttc acataaaaat atagaaatcc aggagactgt ttcgagtgca acagaagttc |
| 6361 | tcagtatttg gagggtcctc tcaaaaattc tgcggcctta ctttgatatt gacacctgca |
| 6421 | ctgtgccatt cctgattatt ccattcagga tctgtatcag cgggatgggg catggtcccc |
| 6481 | agcacaactc ttctgggtta aaaaaaaaaa gccaggtgat tcctttgtgt gttatgtcgt |
| 6541 | aagtggagtg acttcatcat atatggaaga agatttctat attcagcttt ttctgcaggt |
| 6601 | tggagtcagc atagagttgg aaaatcagct ttggctttct ttcctgtctc atttcctcta |
| 6661 | gtgttctcct ttttattgtc atcagctctc aacaactctg ccacttttgt gtcccaaggt |
| 6721 | aataagatgt aggaaacaaa acattgtaaa gtggagcaag aaaagttatc aattaaccac |
| 6781 | atcagagtca aatgtcttgg gtgacactaa ggaggatatg ggcaggtgat accagagtgc |
| 6841 | tttatcttgt gatgttgata cagtagcagc ctctcagaca ttcagccagg ttggatttct |
| 6901 | catgagtttg tcacctagtt ttgaatccta tccccttggt ttctgcagga aaaaaaaaaa |
| 6961 | aatttatgtg gtttttaaaa tttgttctga gtggggagaa tcttaggggg aatgtactga |
| 7021 | atagtatcat gggctcagct cccccatgca gggccaacaa ataccaaaat gagtaaactg |
| 7081 | ggaagctttt ctctctttct gtcttcatcc cagatcaaag aatcccgagt taggatctgg |
| 7141 | atgaaggata agcccctgaa ttgtcgatgg gctcaccccc acactgaccc agcatctgaa |
| 7201 | cttgcttaac agggagccgg ggctaaactg cttcaccctg cctgagaacc agggagcact |
| 7261 | gcatttctcc acagggtgga ggagaagagg cagaataaac caagcctggg acacctccct |
| 7321 | cctgtctagg tgtactcatt cttctgtttc aaaagaaggc aaggacatga agtcaacttc |
| 7381 | tacctatctt ctgctgctgg tgtcttatgt attctcagtt tgacctgatt cctcttctgt |
| 7441 | cttttgactt aacattaggg gttcttggtc ataacctgct ctgatgtaca taaagatttc |
| 7501 | aggttcaata tcaatgtgtc ttaaaacaga agtattttag cgggtggggg gtggggtggt |
| 7561 | ggggacaaac aacgcaggat ataattgcca aaaccaggct tgaggttggt gactcttgaa |
| 7621 | agattttctt tcttcaggcc tagatcagaa aattaagtgc agcaatatca tgaattctca |
| 7681 | gaagcccttt cagggagcca gtgagtcata cagtatccac agttgagtca cttaaagatg |
| 7741 | tcagtatacg aaacattatt cacaatcctt gggcaatctc attttttttt ccttctcccc |
| 7801 | tcctcccctg ccccccatac atttctatcc ttgagttagt tttggagggg caggaagtac |
| 7861 | ttaacatctc agaagctaga ttgggaaaca tgctcagcta taagaactga gctttaaatt |
| 7921 | ttgagtttaa aaatgtacat caggagcagc tggggggggt ctttttttaa aaaaatcttt |
| 7981 | caaatttggt tttctgtgca tatggccgtt ttgtaaatac tttggggttt ttcatttttt |
| 8041 | tgaaagtaga tgaaatctgt tgtgggattt ttttcccgaa acattacaaa ataacctgtt |
| 8101 | tatttacatg caaataaact tctttgataa aaagtaa |

[0104] An amino acid sequence for the protein (mediator complex subunit 12) encoded by the MED12 gene that is a regulator of T cell exhaustion/dysfunction resistance is available from the UniPROT database at accession no. Q93074 or accession number NP_005111, cDNA NM_005120 with gene location at Chr X: 71.12-71.14 Mb.

[0105] An amino acid sequence for the protein encoded by the human MED12 (mediator complex subunit 12) gene that is a regulator of T cells is available as GenBank accession no. KAI4000107.1, shown below as SEQ ID NO: 83.

| (SEQ ID NO: 83) | |
|---|---|
| 1 | MAAFGILSYE HRPLKRPRLG PPDVYPQDPK QKEDELTALN VKQGFNNQPA VSGDEHGSAK |
| 61 | NVSFNPAKIS SNFSSIIAEK LRCNTLPDTG RRKPQVNQKD NFWLVTARSQ SAINTWFTDL |
| 121 | AGTKPLTQLA KKVPIFSKKE EVFGYLAKYT VPVMRAAWLI KMTCAYYAAI SETKVKKRHV |
| 181 | DPFMEWTQII TKYLWEQLQK MAEYYRPGPA GSGGCGSTIG PLPHDVEVAI RQWDYTEKLA |
| 241 | MFMFQDGMLD RHEFLTWVLE CFEKIRPGED ELLKLLLPLL LRYSGEFVQS AYLSRRLAYF |
| 301 | CTRRLALQLD GVSSHSSHVI SAQSTSTLPT TPAPQPPTSS TPSTPFSDLL MCPQHRPLVF |
| 361 | GLSCILQTIL LCCPSALVWH YSLTDSRIKT GSPLDHLPIA PSNLPMPEGN SAFTQQVRAK |
| 421 | LREIEQQIKE RGQAVEVRWS FDKCQEATAG FTIGRVLHTL EVLDSHSFER SDFSNSLDSL |
| 481 | CNRIFGLGPS KDGHEISSDD DAVVSLLCEW AVSCKRSGRH RAMVVAKLLE KRQAEIEAER |
| 541 | CGESEAADEK GSIASGSLSA PSAPIFQDVL LQFLDTQAPM LTDPRSESER VEFFNLVLLF |
| 601 | CELIRHDVFS HNMYTCTLIS RGDLAFGAPG PRPPSPFDDP ADDPEHKEAE GSSSSKLEDP |
| 661 | GLSESMDIDP SSSVLFEDME KPDFSLFSPT MPCEGKGSPS PEKPDVEKEV KPPPKEKIEG |
| 721 | TLGVLYDQPR HVQYATHFPI PQEESCSHEC NQRLVVLFGV GKQRDDARHA IKKITKDILK |
| 781 | VLNRKGTAET DQLAPIVPLN PGDLTFLGGE DGQKRRRNRP EAFPTAEDIF AKFQHLSHYD |
| 841 | QHQVTAQVSR NVLEQITSFA LGMSYHLPLV QHVQFIFDLM EYSLSISGLI DFAIQLLNEL |
| 901 | SVVEAELLLK SSDLVGSYTT SLCLCIVAVL RHYHACLILN QDQMAQVFEG LCGVVKHGMN |
| 961 | RSDGSSAERC ILAYLYDLYT SCSHLKNKFG ELFSDFCSKV KNTIYCNVEP SESNMRWAPE |
| 1021 | FMIDTLENPA AHTFTYTGLG KSLSENPANR YSFVCNALMH VCVGHHDPDR VNDIAILCAE |
| 1081 | LTGYCKSLSA EWLGVLKALC CSSNNGTCGF NDLLCNVDVS DLSFHDSLAT FVAILIARQC |
| 1141 | LLLEDLIRCA AIPSLLNAAC SEQDSEPGAR LTCRILLHLF KTPQLNPCQS DGNKPTVGIR |
| 1201 | SSCDRHLLAA SQNRIVDGAV FAVLKAVFVL GDAELKGSGF TVTGGTEELP EEEGGGGSGG |
| 1261 | RRQGGRNISV ETASLDVYAK YVLRSICQQE WVGERCLKSL CEDSNDLQDP VLSSAQAQRL |
| 1321 | MQLICYPHRL LDNEDGENPQ RQRIKRILQN LDQWTMRQSS LELQLMIKQT PNNEMNSLLE |
| 1381 | NIAKATIEVF QQSAETGSSS GSTASNMPSS SKTKPVLSSL ERSGVWLVAP LIAKLPTSVQ |
| 1441 | GHVLKAAGEE LEKGQHLGSS SRKERDRQKQ KSMSLLSQQP FLSLVLTCLK GQDEQREGLL |
| 1501 | TSLYSQVHQI VNNWRDDQYL DDCKPKQLMH EALKLRLNLV GGMFDTVQRS TQQTTEWAML |
| 1561 | LLEIIISGTV DMQSNNELFT TVLDMLSVLI NGTLAADMSS ISQGSMEENK RAYMNLAKKL |
| 1621 | QKELGERQSD SLEKVRQLLP LPKQTRDVIT CEPQGSLIDT KGNKIAGFDS IFKKEGLQVS |
| 1681 | TKQKISPWDL FEGLKPSAPL SWGWFGTVRV DRRVARGEEQ QRLLLYHTHL RPRPRAYYLE |
| 1741 | PLPLPPEDEE PPAPTLLEPE KKAPEPPKTD KPGAAPPSTE ERKKKSTKGK KRSQPATKTE |
| 1801 | DYGMGPGRSG PYGVTVPPDL LHHPNPGSIT HLNYRQGSIG LYTQNQPLPA GGPRVDPYRP |
| 1861 | VRLPMQKLPT RPTYPGVLPT TMTGVMGLEP SSYKTSVYRQ QQPAVPQGQR LRQQLQSQGM |
| 1921 | LGQSSVHQMT PSSSYGLQTS QGYTPYVSHV GLQQHTGPAG TMVPPSYSSQ PYQSTHPSTN |
| 1981 | PTLVDPTRHL QQRPSGYVHQ QAPTYGHGLT STQRFSHQTL QQTPMISTMT PMSAQGVQAG |
| 2041 | VRSTAILPEQ QQQQQQQQQQ QQQQQQQQQQ QQQQQYHIRQ QQQQQILRQQ QQQQQQQQQQ |
| 2101 | QQQQQQQQQQ QQQQHQQQQQ QQAAPPQPQP QSQPQFQRQG LQQTQQQQQT AALVRQLQQQ |
| 2161 | LSNTQPQPST NIFGRY |

A cDNA sequence encoding the protein is available from the NCBI database as accession no. NM_005120.3.

| (SEQ ID NO: 84) | |
|---|---|
| 1 | agtttccggc aatggtcgag agtttctaac gtgccccctt gttgtctctc ggccgccgtc |
| 61 | ctctcaacca ccgcccccct tttcggctcc ctctccccct tcccgttccc ccagtcagcc |
| 121 | tggccctgct ggtgcctccg gcgctacggg ctgggcaaga tggcggcctt cgggatcttg |
| 181 | agctacgaac accggcccct gaagcggccg cggctggggc ctcccgatgt ttaccctcag |
| 241 | gaccccaaac agaaggagga tgaactgacg gccttgaatg taaaacaagg tttcaataac |
| 301 | cagcctgctg tctctgggga tgagcatggc agtgccaaga acgtcagctt caatcctgcc |
| 361 | aagatcagtt ccaacttcag cagcattatt gcagagaaat tacgttgtaa tacccttcct |
| 421 | gacactggtc gcaggaagcc ccaagtgaac cagaaggata acttctggct ggtgactgca |
| 481 | cgatcccaga gtgccattaa cacttggttc actgacttgg ctggcaccaa gccactcacg |
| 541 | caactagcca aaaaggtccc cattttcagt aagaaggaag aggtgtttgg gtacttagcc |
| 601 | aaatacacag tgcctgtgat gcgggctgcc tggctcatta agatgacctg tgcctactat |
| 661 | gcagcaatct ctgagaccaa ggttaagaag agacatgttg accctttcat ggaatggact |
| 721 | cagatcatca ccaagtactt atgggagcag ttacagaaga tggctgaata ctaccggcca |
| 781 | gggcctgcag gaagtggggg ctgtggttcc acgatagggc ccttgcccca tgatgtagag |
| 841 | gtggcaatcc ggcagtggga ttacaccgag aagctggcca tgttcatgtt tcaggatgga |
| 901 | atgctggaca gacatgagtt cctgacctgg gtgcttgagt gttttgagaa gatccgccct |
| 961 | ggagaggatg aattgcttaa actgctgctg cctctgcttc tccgatactc tggggaattt |
| 1021 | gttcagtctg catacctgtc ccgccggctt gcctacttct gtacacggag actggccctg |
| 1081 | cagctggatg gtgtgagcag tcactcatct catgttatat ctgctcagtc aacaagcacg |
| 1141 | ctacccacca cccctgctcc tcagccccca actagcagca caccctcgac tccctttagt |
| 1201 | gacctgctta tgtgccctca gcaccggccc ctggcttttg gcctcagctg tatcctacag |
| 1261 | accatcctcc tgtgctgtcc tagtgccttg gtttggcact actcactgac tgatagcaga |
| 1321 | attaagaccg gctcaccact tgaccacttg cctattgccc cgtccaacct gcccatgcca |
| 1381 | gagggtaaca gtgccttcac tcagcaggtc cgtgcaaagt tgcgggagat cgagcagcag |
| 1441 | atcaaggagc ggggacaggc agttgaagtt cgctggtctt tcgataaatg ccaggaagct |
| 1501 | actgcaggct tcaccattgg acgggtactt catactttgg aagtgctgga cagccatagt |
| 1561 | tttgaacgct ctgacttcag caactctctt gactcccttt gtaaccgaat ctttggattg |
| 1621 | ggacctagca aggatgggca tgagatctcc tcagatgatg atgctgtggt gtcattgcta |
| 1681 | tgtgaatggg ctgtcagctg caagcgttct ggtcggcatc gtgctatggt ggtagccaag |
| 1741 | ctcctggaga agagacaggc ggagattgag gctgagcgtt gtggagaatc agaagccgca |
| 1801 | gatgagaagg gttccatcgc ctctggctcc ctttctgctc ccagtgctcc cattttccag |
| 1861 | gatgtcctcc tgcagtttct ggatacacag gctcccatgc tgacggaccc tcgaagtgag |
| 1921 | agtgagcggg tggaattctt taacttagta ctgctgttct gtgaactgat tcgacatgat |
| 1981 | gttttctccc acaacatgta tacttgcact ctcatctccc gaggggacct tgcctttgga |
| 2041 | gcccctggtc cccggcctcc ctctcccttt gatgatcctg ccgatgaccc agagcacaag |
| 2101 | gaggctgaag gcagcagcag cagcaagctg gaagatccag ggctctcaga atctatggac |
| 2161 | attgacccta gttccagtgt tctctttgag gacatggaga agcctgattt ctcattgttc |
| 2221 | tcccctacta tgccctgtga ggggaagggc agtccatccc ctgagaagcc agatgtcgag |
| 2281 | aaggaggtga agcccccacc caaggagaag attgaaggga cccttggggt tctttacgac |
| 2341 | cagccacgac acgtgcagta cgccacccat tttcccatcc cccaggagga gtcatgcagc |
| 2401 | catgagtgca accagcggtt ggtcgtactg tttggggtgg gaaagcagcg agatgatgcc |
| 2461 | cgccatgcca tcaagaaaat caccaaggat atcttgaagg ttctgaaccg caaagggaca |
| 2521 | gcagaaactg accagcttgc tcctattgtg cctctgaatc ctggagacct gacattctta |
| 2581 | ggtggggagg atgggcagaa gcggcgacgc aaccggcctg aagccttccc cactgctgaa |
| 2641 | gatatctttg ctaagttcca gcacctttca cattatgacc aacaccaggt cacggctcag |
| 2701 | gtctcccgga atgttctgga gcagatcacg agctttgccc ttggcatgtc ataccacttg |
| 2761 | cctctggtgc agcatgtgca gttcatcttc gacctcatgg aatattcact cagcatcagt |
| 2821 | ggcctcatcg actttgccat tcagctgctg aatgaactga gtgtagttga ggctgagctg |
| 2881 | cttctcaaat cctcggatct ggtgggcagc tacactacta gcctgtgcct gtgcatcgtg |
| 2941 | gctgtcctgc ggcactatca tgcctgcctc atccccaacc aggaccagat ggcacaggtc |
| 3001 | tttgaggggc tgtgtggcgt cgtgaagcat gggatgaacc ggtccgatgg ctcctctgca |
| 3061 | gagcgctgta tccttgctta tctctatgat ctgtacacct cctgtagcca tttaaagaac |
| 3121 | aaatttgggg agctcttcag cgacttttgc tcaaaggtga agaacaccat ctactgcaac |
| 3181 | gtggagccat cggaatcaaa tatgcgctgg gcacctgagt tcatgatcga cactctagag |
| 3241 | aaccctgcag ctcacacctt cacctacacg gggcraggca agagtcttag tgagaaccct |
| 3301 | gctaaccgct acagctttgt ctgcaatgcc cttatgcacg tctgtgtggg gcaccatgat |
| 3361 | cccgataggg tgaatgacat cgcaatcctg tgtgcagagc tgaccggcta ttgcaagtca |
| 3421 | ctgagtgcag aatggctagg agtgcttaag gcctcgtgct gctcctctaa caatggcact |
| 3481 | tgtggtttca acgatctcct ctgcaatgtt gatgtcagtg acctatcttt tcatgactcg |
| 3541 | ctggctactt ttgttgccat cctcatcgct cggcagtgtt tgctcctgga agatctgatt |
| 3601 | cgctgtgctg ccatcccttc actccttaat gctgcttgta gtgaacagga ctctgagcca |
| 3661 | ggggcccggc ttacctgccg catcctcctt caccttttca agacaccgca gctcaatcct |
| 3721 | tgccagtctg atggaaacaa gcctacagta ggaatccgct cctcctgcga ccgccacctg |
| 3781 | ctggctgcct cccagaaccg catcgtggat ggagccgtgt ttgctgttct caaggctgtg |
| 3841 | tttgtacttg gggatgcgga actgaaaggt tcaggcttca ctgtgacagg aggaacagaa |
| 3901 | gaacttccag aggaggaggg aggaggtggc agtggtggtc ggaggcaggg tggccgcaac |
| 3961 | atctctgtgg agacagccag tctggatgtc tatgccaagt acgtgctgcg cagcatctgc |
| 4021 | caacaggaat gggtaggaga acgttgcctt aagtctctgt gtgaggacag caatgacctg |
| 4081 | caagacccag tgttgagtag tgcccaggcg cagcgcctca tgcagctcat ttgctatcca |
| 4141 | catcgactgc tggacaatga ggatggggaa aacccccagc ggcagcgcat aaagcgcatt |
| 4201 | ctccagaact tggaccagtg gaccatgcgc cagtcttcct tggagctgca gctcatgatc |
| 4261 | aagcagaccc ctaacaatga gatgaactcc ctcttggaga acatcgccaa ggccacaatc |
| 4321 | gaggttttcc aacagtcagc agagacaggg tcatcttctg gaagtactgc aagcaacatg |
| 4381 | cccagcagca gcaagaccaa gcctgtgctc agctctctag agcgctctgg tgtatggctg |
| 4441 | gtggcccccc tcattgctaa actgcccacc tcagtccagg gacatgtgtt aaaggctgct |
| 4501 | ggggaagaat tggagaaggg tcagcacctg ggttcctctt cacgcaaaga acgtgatcga |
| 4561 | caaaagcaga agagcatgtc cctattgagc cagcagccct tcttatcgct ggtgctaaca |
| 4621 | tgtctgaaag ggcaggatga acaacgcgag ggactcctta cctccctcta cagccaggtg |
| 4681 | caccagattg tgaataattg gcgagatgac cagtacttag atgattgcaa accaaagcag |
| 4741 | cttatgcatg aggcactcaa actgcggctc aacctggtgg ggggcatgtt tgacacggtg |
| 4801 | cagcgcagca cccagcagac cacggagtgg gccatgctcc tcctggagat catcatcagc |
| 4861 | ggcactgtcg acatgcagtc caacaatgag ctcttcacta ctgtgttgga catgctgagc |
| 4921 | gtgctcatca atgggacatt ggctgcagac atgtctagca tctcgcaagg tagcatggag |
| 4981 | gaaaacaagc gtgcatacat gaacctggcg aagaagttgc agaaggagtt gggggagcgc |
| 5041 | cagtcagaca gtctggaaaa ggttcgccag ctgctgccac tgcccaagca gacccgagat |
| 5101 | gtcatcacgt gtgagccaca gggctccctt atcgatacca agggcaacaa gattgctggc |
| 5161 | ttcgattcca tcttcaagaa ggagggtcta caggcttcca ccaaacagaa gatctcgccc |
| 5221 | tgggatcttt ttgaggggtt gaagccgtca gcaccactct cttggggctg gtttggaaca |
| 5281 | gtccgagtgg accggcgagt ggctcgagga gaggagcagc agcggttgct gctctaccac |
| 5341 | acacacctga ggccccggcc ccgcgcctat tacctggagc cactgccact gcccccagaa |
| 5401 | gatgaggagc cgcctgctcc taccctgcta gagcctgaga aaaaggctcc agagcccccc |
| 5461 | aaaactgaca aaccgggggc tgctccaccc agtactgagg aacgcaagaa gaagtccacc |
| 5521 | aagggcaaga aacgcagcca gccagctacc aagacagagg actatggaat gggcccgggt |
| 5581 | cggagcggcc cttatggtgt gacagtgcct ccggacctcc tgcaccaccc aaaccctggt |
| 5641 | tctataacac accttaacta caggcaaggc tccataggcc tgtacaccca gaaccagcca |
| 5701 | ctacctgcag gtggccctcg tgtggaccca taccgtcctg tgcgcttacc aatgcagaag |
| 5761 | ctgcccaccc gaccaactta ccctggagtg ctgcccacaa ccatgactgg cgtcatgggt |
| 5821 | ttagaaccct cctcttataa gacctctgtg taccggcagc agcaacctgc ggtgccccaa |
| 5881 | ggacagcgcc ttcgccaaca gctccagcag agtcagggca tgttgggaca gtcatctgtc |
| 5941 | catcagatga ctcccagctc ttcctacggt ttgcagactt cccagggcta tactccttat |
| 6001 | gtttctcatg tgggattgca gcaacacaca ggccctgcag gtaccatggt gccccccagc |
| 6061 | tactccagcc agccttacca gagcacccac ccttctacca atcctactct tgtagatcct |
| 6121 | acccgccacc tgcaacagcg gcccagtggc tatgtgcacc agcaggcccc cacctatgga |
| 6181 | catggactga cctccactca aaggttttca caccagacac tgcagcagac acccatgata |
| 6241 | agtaccatga ctccaatgag tgcccagggc gtccaggcag gcgtccgttc aacagccatc |
| 6301 | ctacctgagc agcagcagca gcagcaacag cagcaacagc aacagcagca gcagcagcaa |
| 6361 | cagcaacagc agcagcagca gcagcagtac cacatccggc agcagcagca gcagcagatc |
| 6421 | ctgcggcagc agcagcaaca gcaacagcag cagcagcagc agcagcaaca gcaacagcag |
| 6481 | cagcagcaac agcaacaaca gcaacaccag cagcaacagc agcaacaggc ggctcctccc |
| 6541 | caaccccagc cccagtccca gccccagttc cagcgccagg ggcttcagca gacccagcag |
| 6601 | cagcaacaga cagcagcttc ggtccggcaa cttcaacaac agctctctaa tacccagcca |
| 6661 | cagcccagta ccaacatatt tggacgctac tgagccacct ggaggaactg cttgtgcact |
| 6721 | ggatgtggcc ccaccctttc ctcttaattc ccaatcccat tcctgggcta gcaccagtag |
| 6781 | tggttggggc cctcccctca ggctccattt ttaataagtt tttagtattt ttgttaatgt |
| 6841 | gaggcattga gctgttgggt tttgtatatt atttatatag agaccccaga gctgttgcac |
| 6901 | ccaatacaca gagcttcttt gcaaa |

[0106] An amino acid sequence for the protein (mediator complex subunit 13) encoded by the MED13 gene that is a regulator of T cell exhaustion/dysfunction resistance is available from the UniPROT database at accession no. Q9UHV7 or accession number NM_005121, cDNA NP_005112 with gene location at Chr 17: 61.94-62.07 Mb.

| (SEQ ID NO: 85) | |
|---|---|
| MSASFVPNGASLEDCHCNLFCLADLTGIKWKKYVWQGPTSAPIL | |
| FPVTEEDPILSSFSRCLKADVLGVWRRDQRPGRRELWIFWWGEDPSFADLIHHDLSEE | |
| EDGVWENGLSYECRTLLFKAVHNLLERCLMNRNFVRIGKWFVKPYEKDEKPINKSEHL | |
| SCSFTFFLHGDSNVCTSVEINQHQPVYLLSEEHITLAQQSNSPFQVILCPFGLNGTLT | |
| GQAFKMSDSATKKLIGEWKQFYPISCCLKEMSEEKQEDMDWEDDSLAAVEVLVAGVRM | |
| IYPACFVLVPQSDIPTPSPVGSTHCSSSCLGVHQVPASTRDPAMSSVTLTPPTSPEEV | |
| QTVDPQSVQKWVKFSSVSDGFNSDSTSHHGGKIPRKLANHVVDRVWQECNMNRAQNKR | |
| KYSASSGGLCEEATAAKVASWDFVEATQRTNCSCLRHKNLKSRNAGQQGQAPSLGQQQ | |
| QILPKHKTNEKQEKSEKPQKRPLTPFHHRVSVSDDVGMDADSASQRLVISAPDSQVRF | |
| SNIRTNDVAKTPQMHGTEMANSPQPPPLSPHPCDVVDEGVTKTPSTPQSQHFYQMPTP | |
| DPLVPSKPMEDRIDSLSQSFPPQYQEAVEPTVYVGTAVNLEEDEANIAWKYYKFPKKK | |
| DVEFLPPQLPSDKFKDDPVGPFGQESVTSVTELMVQCKKPLKVSDELVQQYQIKNQCL | |
| SAIASDAEQEPKIDPYAFVEGDEEFLFPDKKDRQNSEREAGKKHKVEDGTSSVTVLSH | |
| EEDAMSLFSPSIKQDAPRPTSHARPPSTSLIYDSDLAVSYTDLDNLFNSDEDELTPGS | |
| KKSANGSDDKASCKESKTGNLDPLSCISTADLHKMYPTPPSLEQHIMGFSPMNMNNKE | |
| YGSMDTTPGGTVLEGNSSSIGAQFKIEVDEGFCSPKPSEIKDFSYVYKPENCQILVGC | |
| SMFAPLKTLPSQYLPPIKLPEECIYRQSWTVGKLELLSSGPSMPFIKEGDGSNMDQEY | |
| GTAYTPQTHTSFGMPPSSAPPSNSGAGILPSPSTPRFPTPRTPRTPRTPRGAGGPASA | |
| QGSVKYENSDLYSPASTPSTCRPLNSVEPATVPSIPEAHSLYVNLILSESVMNLFKDC | |
| NFDSCCICVCNMNIKGADVGVYIPDPTQEAQYRCTCGFSAVMNRKFGNNSGLFLEDEL | |
| DIIGRNTDCGKEAEKRFEALRATSAEHVNGGLKESEKLSDDLILLLQDQCTNLFSPFG | |
| AADQDPFPKSGVISNWVRVEERDCCNDCYLALEHGRQFMDNMSGGKVDEALVKSSCLH | |
| PWSKRNDVSMQCSQDILRMLLSLQPVLQDAIQKKRTVRPWGVQGPLTWQQFHKMAGRG | |
| SYGTDESPEPLPIPTFLLGYDYDYLVLSPFALPYWERLMLEPYGSQRDIAYVVLCPEN | |
| EALLNGAKSFFRDLTAIYESCRLGQHRPVSRLLTDGIMRVGSTASKKLSEKLVAEWFS | |
| QAADGNNEAFSKLKLYAQVCRYDLGPYLASLPLDSSLLSQPNLVAPTSQSLITPPQMT | |
| NTGNANTPSATLASAASSTMTVTSGVAISTSVATANSTLTTASTSSSSSSNLNSGVSS | |
| NKLPSFPPFGSMNSNAAGSMSTQANTVQSGQLGGQQTSALQTAGISGESSSLPTQPHP | |
| DVSESTMDRDKVGIPTDGDSHAVTYPPAIVVYIIDPFTYENTDESTNSSSVWTLGLLR | |
| CFLEMVQTLPPHIKSTVSVQIIPCQYLLQPVKHEDREIYPQHLKSLAFSAFTQCRRPL | |
| PTSTNVKTLTGFGPGLAMETALRSPDRPECIRLYAPPFILAPVKDKQTELGETFGEAG | |
| QKYNVLFVGYCLSHDQRWILASCTDLYGELLETCIINIDVPNRARRKKSSARKFGLQK | |
| LWEWCLGLVQMSSLPWRVVIGRLGRIGHGELKDWSCLLSRRNLQSLSKRLKDMCRMCG | |
| ISAADSPSILSACLVAMEPQGSFVIMPDSVSTGSVFGRSTTLNMQTSQLNTPQDTSCT | |
| HILVFPTSASVQVASATYTTENLDLAFNPNNDGADGMGIFDLLDTGDDLDPDIINILP | |
| ASPTGSPVHSPGSHYPHGGDAGKGQSTDRLLSTEPHEEVPNILQQPLALGYFVSTAKA | |
| GPLPDWFWSACPQAQYQCPLFLKASLHLHVPSVQSDELLHSKHSHPLDSNQTSDVLRF | |
| VLEQYNALSWLTCDPATQDRRSCLPIHFVVLNQLYNFIMNML | |
| (SEQ ID NO: 86) | |
| 1 | ctctctctgg tcggaggcgg cggtaatggc ggatggtggg ttgtggcgcc ggcggcggct |
| 61 | gctgtgaggg acgatgagtg cctccttcgt gccgaacggg gccagcctgg aagattgtca |
| 121 | ctgtaacctc ttctgcctgg ctgacttgac aggaattaag tggaaaaaat atgtatggca |
| 181 | aggcccaact tctgccccta ttctgtttcc tgtgacagaa gaagacccca ttttgagcag |
| 241 | ttttagtcgc tgccttaagg cagatgtact tggtgtttgg cggcgagatc aaagacctgg |
| 301 | aagaagagaa ttgtggatat tttggtgggg tgaagacccc agttttgctg accttattca |
| 361 | ccatgactta tcagaagaag aagatggagt gtgggagaat ggactttcct atgaatgccg |
| 421 | tactctgctt ttcaaagcag ttcacaatct attggaacgg tgtttaatga acaggaattt |
| 481 | tgtacgtatt ggcaagtggt ttgtaaagcc ttatgaaaaa gatgaaaaac ctataaataa |
| 541 | aagtgaacac ttgtcctgct ccttcacctt tttcttgcat ggagacagca atgtttgtac |
| 601 | cagtgtggaa attaaccaac atcaacctgt ataccttctc agtgaagagc atatcaccct |
| 661 | tgctcaacag tctaatagcc catttcaagt tatcttatgc ccatttggac taaatggcac |
| 721 | tctcacagga caggcattca agatgtctga ttcagctaca aaaaaattaa ttggtgaatg |
| 781 | gaaacagttc tatcctatct catgttgctt gaaggagatg tctgaagaaa aacaggaaga |
| 841 | tatggattgg gaagatgatt ctttagctgc agtagaagtt cttgttgctg gtgtccgaat |
| 901 | gatctaccca gcatgctttg ttctagtccc tcagtcagac attcctactc ctagccctgt |
| 961 | gggatccact cactgttcat cttcttgctt gggtgtccac caagtgcctg cttccacaag |
| 1021 | agatcctgct atgtcttcgg ttacgcttac accacctacg tctcctgagg aagtccaaac |
| 1081 | agttgatcct cagtctgtcc agaagtgggt caaattttct tcagtatctg atggcttcaa |
| 1141 | ctccgatagt actagccacc atggtgggaa aatacccaga aaattagcaa atcatgtggt |
| 1201 | ggatagagtt tggcaagaat gcaatatgaa cagagcacag aacaagagga agtattctgc |
| 1261 | ttcatcaggt ggtctatgcg aagaagcgac agctgctaaa gtggcatcct gggattttgt |
| 1321 | tgaagccaca caaagaacaa attgcagttg tttgaggcac aaaaatctca agtcaagaaa |
| 1381 | tgctggacaa caaggacagg caccatcttt aggtcagcaa caacaaatac ttcctaagca |
| 1441 | caagaccaat gagaagcaag aaaagagtga aaagccacag aaacgcccct tgactccttt |
| 1501 | tcaccatcgt gtgtctgtta gtgatgatgt tggcatggac gcagattcag ccagccaaag |
| 1561 | acttgtgatc tctgctccag acagtcaagt gagattttca aatatccgaa ctaatgatgt |
| 1621 | agcaaagact cctcagatgc atggcaccga aatggcaaat tcacctcaac cacccccact |
| 1681 | tagtcctcac ccttgtgatg tggttgatga aggagtgact aaaacacctt caactcctca |
| 1741 | gagtcaacat ttttatcaaa tgccaacacc agatcccttg gttccttcta aaccaatgga |
| 1801 | agataggata gacagtttgt cccagtcttt cccacctcaa tatcaggaag ctgtagaacc |
| 1861 | tacagtatat gttggtacag cagtaaactt ggaagaagat gaagccaata tagcctggaa |
| 1921 | gtattacaag ttcccaaaga aaaaagatgt agagttttta ccacctcaac ttccaagtga |
| 1981 | taaattcaag gatgatccag ttggaccttt tggacaggaa agtgtaacat cagttacaga |
| 2041 | gttaatggtg caatgtaaga aacctttaaa agtttctgat gaattagtgc agcaatatca |
| 2101 | aattaaaaac cagtgtcttt cagcaatagc atctgatgca gaacaagaac ctaaaattga |
| 2161 | tccatatgca tttgttgaag gagatgagga attccttttt cctgataaaa aagatagaca |
| 2221 | aaatagtgag agagaagctg gaaaaaaaca caaggtagaa gatgggacat ctagtgtaac |
| 2281 | agtgttatca catgaagaag atgctatgtc attatttagt ccctctatca agcaagatgc |
| 2341 | tccacgccct actagtcatg cccgtcctcc atcaacaagt ttgatttatg actcagacct |
| 2401 | ggctgtctct tatactgacc ttgataatct cttcaattct gatgaagatg aactaacacc |
| 2461 | tggatctaaa aaatcagcaa atggatcaga tgataaagcc agctgcaagg aatcaaagac |
| 2521 | aggaaatctg gacccgttat cttgcataag cactgcagat cttcataaaa tgtatcctac |
| 2581 | accaccatca ttggaacaac atattatggg attttcccca atgaatatga ataataaaga |
| 2641 | atatggtagt atggatacaa cacctggagg aactgttcta gaaggaaata gttctagtat |
| 2701 | aggagcgcag ttcaaaattg aggttgatga gggattctgt agccccaaac cttctgaaat |
| 2761 | taaagatttt tcttatgtct ataagcctga aaattgtcaa attctagtgg gatgttccat |
| 2821 | gtttgcacct ctaaaaactc taccaagcca atatctgccc cctatcaaat tgccagaaga |
| 2881 | gtgtatttac cgtcagagtt ggactgttgg aaaattggaa ttgctttctt cagggccttc |
| 2941 | aatgccattc atcaaagagg gtgatggaag taatatggat caagaatatg gcactgctta |
| 3001 | tacacctcaa actcatactt cttttgggat gcctcctagc agtgcacctc ctagtaacag |
| 3061 | cggagcagga attcttcctt ctccatccac ccctcggttt ccaactccaa ggactccaag |
| 3121 | gactcctcgg actcctcgtg gagctggtgg acctgctagt gctcaaggtt cagtcaaata |
| 3181 | tgaaaattca gacttgtatt caccagcttc taccccatct acatgcagac cccttaattc |
| 3241 | tgttgaacct gcaactgtcc cttccatccc tgaagcacac agtctttatg taaacctcat |
| 3301 | cctttcagaa tcagttatga atttgtttaa agactgtaac tttgatagtt gttgcatctg |
| 3361 | tgtttgcaac atgaacatca agggtgccga tgttggagtt tacattccag atccaacgca |
| 3421 | ggaagcacaa tataggtgta cctgtggctt cagtgctgtc atgaacagaa aatttggaaa |
| 3481 | caattcagga ttatttcttg aagatgaact agatatcata ggacgcaata cagactgtgg |
| 3541 | caaagaagca gaaaaacgtt ttgaagctct cagggctacc tctgctgaac atgttaatgg |
| 3601 | aggactaaag gaatctgaaa aattatctga tgatttgata ttattgctac aagatcagtg |
| 3661 | cactaattta ttttcaccct ttggagcagc agaccaagat ccttttccta aaagtggtgt |
| 3721 | aattagcaat tgggtacgtg ttgaagagcg tgactgttgc aatgactgct accttgcatt |
| 3781 | agaacatggg cgtcagttca tggataacat gtcaggagga aaagttgatg aagcacttgt |
| 3841 | gaaaagttca tgcttacacc cctggtccaa aagaaacgat gtgagtatgc agtgctcaca |
| 3901 | ggatatactt cgaatgctcc tctctcttca gccagttctt caggatgcca ttcagaaaaa |
| 3961 | aagaacagta agaccttggg gtgttcaggg tcctctcact tggcaacaat ttcataaaat |
| 4021 | ggctggccga ggctcttatg gaactgatga atccccagaa ccactgccaa tccccacatt |
| 4081 | tttgttgggt tatgattatg attatctggt gctttctcca tttgctcttc cttattggga |
| 4141 | gagacttatg ctggaaccct atggatctca aagagatata gcctatgttg tactgtgtcc |
| 4201 | agaaaatgaa gccttgttaa atggagcaaa aagctttttt agagatctta ctgcaatata |
| 4261 | tgagtcctgt cgattaggtc aacatagacc tgtttctcga ctgttaacag atgggatcat |
| 4321 | gagagttgga tctactgcat caaagaaact atcagaaaag ttggtagcag aatggttttc |
| 4381 | tcaggcagct gacggtaaca atgaagcatt ttctaaactc aagctttatg cacaagtctg |
| 4441 | cagatatgac ctaggtcctt atcttgcttc cctgccattg gacagctctc tactttccca |
| 4501 | gccaaattta gttgccccta caagtcagtc tttgattact ccacctcaga tgacaaatac |
| 4561 | tggaaatgct aatactccat ctgccacctt agcatctgca gcgagcagca ctatgacagt |
| 4621 | gacttcaggt gttgccatat ctacttcagt tgccacagct aattcaactt tgaccacagc |
| 4681 | ttcaacttca tcttcatcat cctccaactt gaatagtgga gtatcatcaa ataaactacc |
| 4741 | ttcgtttcca ccctttggca gtatgaacag taatgctgca ggatccatgt ctacacaagc |
| 4801 | aaatacagtt cagagtggtc agctaggagg gcaacagaca tcagctctac agacagctgg |
| 4861 | gatttctgga gaatcatctt cacttcccac tcagccgcat cctgatgtgt ctgaaagcac |
| 4921 | gatggatcgg gataaagtgg gaatccccac agatggtgat tcacatgcag tcacgtatcc |
| 4981 | acctgcaatt gttgtttata taattgatcc ttttacatac gaaaatacag acgagagcac |
| 5041 | taactcttct agtgtgtgga cattggggct acttcgatgc tttctagaaa tggtccagac |
| 5101 | tcttcctcct catatcaaga gtactgtttc tgtacagatt attccttgtc agtacctgtt |
| 5161 | gcaacctgtg aagcatgaag atagagaaat ctatccccag catttaaaat ccctggcttt |
| 5221 | ttcggccttt acccagtgtc ggaggccact tccaacatca accaatgtga aaacattgac |
| 5281 | tggctttggt ccaggtttag ccatggaaac tgcccttaga agtcctgata gaccagagtg |
| 5341 | tattcgactt tatgcacctc cttttattct ggctccagtg aaggacaaac agacagagct |
| 5401 | aggagaaaca tttggagaag ctggacagaa atataatgtt ctttttgtgg gatactgttt |
| 5461 | atcacatgat caaaggtgga ttcttgcatc ttgcacagat ctatatggag aacttttaga |
| 5521 | aacttgtatc attaacatcg atgttccaaa tagggctcgt cggaaaaaaa gttctgctag |
| 5581 | aaaatttggt ctacagaaac tttgggagtg gtgcttagga cttgtacaaa tgagttcatt |
| 5641 | gccatggaga gttgtaattg gtcgtctagg aaggattggt catggagaat tgaaagattg |
| 5701 | gagctgtttg ctgagtcgtc gaaacttgca gtctctaagt aaaaggctca aagacatgtg |
| 5761 | tagaatgtgt ggtatatctg ctgcagactc ccctagcatt ctcagtgctt gcttggtggc |
| 5821 | aatggagccg caaggatctt ttgttattat gccagattat gtgtcaactg gttctgtatt |
| 5881 | tggaagaagc acgactctaa atatgcagac atctcagcta aataccccac aggatacatc |
| 5941 | atgtactcat atacttgtgt ttcctacttc tgcttctgtg caagtagctt cagctactta |
| 6001 | taccactgaa aatttggatt tagctttcaa tcccaacaat gatggagcag atggaatggg |
| 6061 | tatctttgat ttgttagaca caggagatga tcttgaccct gatatcatta atatccttcc |
| 6121 | tgcttctcca actggttctc ctgtacattc tccaggatct cattaccccc atggaggtga |
| 6181 | tgcgggcaag ggtcagagta ctgatcggct actatcaaca gaacctcatg aggaagtacc |
| 6241 | taatattctt cagcaaccat tggcccttgg ttactttgta tcaactgcca aagcaggtcc |
| 6301 | attacctgac tggttctggt cagcatgtcc tcaagcacaa tatcagtgtc ccctttttct |
| 6361 | taaggcctct ttgcacctcc acgtgccttc agtgcaatct gacgagctgc ttcacagtaa |
| 6421 | acactcccac ccacttgact caaatcagac ttcagatgtc ctcaggtttg ttttggaaca |
| 6481 | gtacaatgca ctctcctggc taacctgtga ccctgcaacc caggacagac gctcatgtct |
| 6541 | cccaattcat tttgtggtgc tgaatcagtt atataacttt attatgaata tgctgtgatc |
| 6601 | ttcatttgat ggaactgtgc aagaaaagaa caaggaaaaa tggatgtttc gctgcaggat |
| 6661 | taagttacaa ttatcttctc agtgaaggtc atttgtgatg gggtctaatt cttattactt |
| 6721 | caacaaatat tgttttgact tggggggagg ggctataacc ctgctatttt tcattgactc |
| 6781 | tattgaactc tttaggatga tgactgatca tacaaaacgt attataacat tttcgtagca |
| 6841 | aaattaacct tttttttttc cagtcacagt atttgtgaaa agtaatgagc catagtaccc |
| 6901 | agtcatgtta aatgaatatt aaaagcatgg agaggaaaca tgaggaacaa tgaatttcaa |
| 6961 | catatggctt cagaacatga agatgttctt gtatggatta tagtatctag tattcaaaaa |
| /021 | tgcctgcatc tcttctctta tttattgtaa gtttttaaat gtataaattg tcttatattt |
| 7081 | cttaacctct tttataaaaa ttttcctaga aggtttatac tgccttcttg ctttaaagca |
| 7141 | attggtctaa aatatatgta atcgtcttaa ttaaaaagtt gcagtagggt tgcttttaga |
| 7201 | gtattatttt tttgtaaggg ggtgggtggg acagtaaatt tgtattgtct cgatgtacag |
| 7261 | tttaacgggg atagaggggg aataatgtcc ataccattgt gtgtggagga tttacagcta |
| 7321 | agctgtagtt gcagagtaca tgtacagtaa tgaagttcac tgtgtttata aattgaaaag |
| 7381 | gtaccaggtc ttacagcatt ttatatatca catctttaca gaataacatg atggcaatat |
| 7441 | acaagtggta ttgttaggtg gtttaactta gaataaaatg agaattcttc agttatattt |
| 7501 | tgtactatgg tttagggcta tgactaatat ttcaggccat ttccggtgaa agaaacttag |
| 7561 | ttttacaaga aaaaccattt gctactgaat gcttaaacta attttagtgt ttaatgttac |
| 7621 | atgcttaaat ttttttcagt tttaacagtg gcatatttag gcatggaaat attattatga |
| 7681 | aatttatttt caggatctgc tataaggttg aaatttagcc cagctctagg cattttacaa |
| 7741 | attatttttc aagcagtcat tcttgattgt ttgacttttt tttttaaatt aaagattggg |
| 7801 | aatgtatgtg agagtatgca tatgtatggg tgtgtgtgtg tgcgcgcaat caaactgtgg |
| 7861 | tgtaaataga ttctcagtga attctggtat tcagactcta ttccactagt gaaagaacca |
| 7921 | ttttttaaac ttcccttgcc ttttttattt atttaatttt cttggtttgg agatgtcagt |
| 7981 | cccaaacacc agagtctgta cttttctata acacagctca gattaaggta gggcatatgc |
| 8041 | caaggaggtt ctcacctccc taaagaaggg acttgaattt tagggacttt aattcacccc |
| 8101 | tccttcaata caactttccc ccttcttgtt tgcacatgcc aagataactg cttttatgca |
| 8161 | ggctgtaccc ccttgaaaaa tcctttctac agtgctgctc acaaaagagc ccaagttcgc |
| 8221 | ctcctacctg cattgctgac ttgaattcac agtcgccgag tctacctagc tttcttggaa |
| 8281 | gcagtctagc aaaatttcta tttgtacgtt cactaattat ctacaaggac aaaatcagtt |
| 8341 | gtatttacaa aactctactt cagtgtttgt tttagttttt ttttttactg aaacttgttt |
| 8401 | ttgtgaatac tctgtgctta gaattaaata tcactttctt atgaacaaca taacttcttc |
| 8461 | agattgtgta tatgaaaaca ttagcaagtc ttgttttttc tatgaagcaa acacaattgg |
| 8521 | tgacaaaggt tgtcaatcat ttcttcaaaa ttataatgca gttctaatgg tcagcatatt |
| 8581 | ttgatattaa atttaaagat cacctctctg catttgtttt taaattatgc taatacacca |
| 8641 | cacattatgt tggtatgttt tgttctgtac tttccttaaa aaaaaaaaaa aaacttgtct |
| 8701 | gagatttgaa ggaaaatgtg cttatttgga atttccataa aaagagtatc ctttttatac |
| 8761 | acttaatagt gactttacaa aataaaagtt atattctcag ttgtttaaaa tcactaacct |
| 8821 | atgataacca cacctcaatt tgaaagtaga tttaaaatta ttccctgaca ggttatttaa |
| 8881 | tatggagcca taaggaggga acccagtaca caattatttt ttatttggga atcagggaat |
| 8941 | agttcccaaa tatacaggat ttattgataa gatttttttt cttcccttca tatatccatt |
| 9001 | caaactcaat ggaaagttat taaataacca ttagaaaagc tcagtagact tatttgagaa |
| 9061 | attaagcctt gtgcaggatg atggatttga cttactaatg tactgtcaca gacaaatatg |
| 9121 | ggtagttttg tttaaatagg taagcaaaat attatacttt atagcagtgg attaccaaca |
| 9181 | ccttgacttc tttgttacag tgctaacatc tttttttttg tgcaggtatc catgattatt |
| 9241 | aagcagggtg gaagttcagt attttgtcat ttaaaaagat tagttatata atgtctgctt |
| 9301 | ccagccagtg agaaacatcc agccatacct ttcttatgca agccattgag ttatcaggac |
| 9361 | tgtgaattaa cactgtatga ataaatttct gtacacctta ttgtttggcc agaaggccac |
| 9421 | caagtgtact tatatgtaat ccttaaattt taaagtagct gtaattttta aatatttcta |
| 9481 | aacttttctt aaaccactaa aattaagctc ttactactta gtcaactatc ctcagctgta |
| 9541 | ttcgtactca attgtcagta tggcacagat tactgtatta aaatattctc ctttcgtctt |
| 9601 | catatttacc ttctgaggta attttttaac ttaatgtgtt actacaaaga tttgcagatc |
| 9661 | tttaatcaag cactatgtta atactgtaat atcagaatac tatgttgcat tatttaaaat |
| 9721 | gttcaaattg aatagattaa aaagttttta aatgctattg catcatataa tttgctattc |
| 9781 | atccactatg gcattgcata tcaatcagtt aatacactta atgttgcatg agtgatattt |
| 9841 | tggtctgggt ttcctcttaa gattttagtt tgtctgaatt aaggaaaaat gtttttaata |
| 9901 | tacattctta ttttgtccca cccctccaga aataagctgg aaatcttaac tttttggggg |
| 9961 | gtcttttttg gtgttttaat gggcccagaa ctgtggttta aatttttatg tatgtatttt |
| 10021 | cttttttgtg gagtataaat ttaaaaactg gatttgggac ctaaaatact cctcaggttg |
| 10081 | atgtattcat gaagttttaa aacatcttta gttttcaaag taaactggat atgtggacct |
| 10141 | taaagttatt gagtttaagc tacaaattgt aacgtcatta ctggacatgt cagcatcaac |
| 10201 | cctctcaaaa tagcttggtc actttatgaa ggggcgtttt aaagttgttg tttagcagtg |
| 10261 | acatttaata tggtccaatt gcttttcttt ttaacgtgac aaaaagagaa taaggaacaa |
| 10321 | acactattgc tgccgaatgc cataacactg agttgtacaa attgtgattg aggaaatgaa |
| 10381 | aaggtttata ctttttaaaa aaaaaaaaac aaaaacaaaa aacaaaactt caaatggaat |
| 10441 | aaattattca tgaagccttc a |

[0107] An amino acid sequence for the protein (meningioma (disrupted in balanced translocation) 1) encoded by the MN1 gene that is a regulator of T cell exhaustion/dysfunction resistance is available from the UniPROT database at accession no. Q10571 or accession number NP_002421, cDNA NM_002430 with gene location at Chr 22: 27.75-27.8 Mb.

| (SEQ ID NO: 87) | |
|---|---|
| MFGLDQFEPQVNSRNAGQGERNENETGLSMNTHFKAPAFHTGGP | |
| PGPVDPAMSALGEPPILGMNMEPYGFHARGHSELHAGGLQAQPVHGFFGGQQPHHGHP | |
| GSHHPHQHHPHFGGNFGGPDPGASCLHGGRLLGYGGAAGGLGSQPPFAEGYEHMAESQ | |
| GPESFGPQRPGNLPDFHSSGASSHAVPAPCLPLDQSPNRAASFHGLPSSSGSDSHSLE | |
| PRRVTNQGAVDSLEYNYPGEAPSGHFDMFSPSDSEGQLPHYAAGRQVPGGAFPGASAM | |
| PRAAGMVGLSKMHAQPPQQQPQQQQQPQQQQQQHGVFFERFSGARKMPVGLEPSVGSR | |
| HPLMQPPQQAPPPPQQQPPQQPPQQQPPPPPGLLVRQNSCPPALPRPQQGEAGTPSGG | |
| LQDGGPMLPSQHAQFEYPIHRLENRSMHPYSEPVFSMQHPPPQQAPNQRLQHFDAPPY | |
| MNVAKRPRFDFPGSAGVDRCASWNGSMHNGALDNHLSPSAYPGLPGEFTPPVPDSFPS | |
| GPPLQHPAPDHQSLQQQQQQQQQQQQQQQQQQQQQQQQQQQQRQNAALMIKQMASRNQ | |
| QQRLRQPNLAQLGHPGDVGQGGLVHGGPVGGLAQPNFEREGGSTGAGRLGTFEQQAPH | |
| LAQESAWFSGPHPPPGDLLPRRMGGSGLPADCGPHDPSLAPPPPPGGSGVLFRGPLQE | |
| PMRMPGEGHVPALPSPGLQFGGSLGGLGQLQSPGAGVGLPSAASERRPPPPDFATSAL | |
| GGQPGFPFGAAGRQSTPHSGPGVNSPPSAGGGGGSSGGGGGGGAYPPQPDFQPSQRTS | |
| ASKLGALSLGSFNKPSSKDNLFGQSCLAALSTACQNMIASLGAPNLNVTFNKKNPPEG | |
| KRKLSQNETDGAAVAGNPGSDYFPGGTAPGAPGPGGPSGTSSSGSKASGPPNPPAQGD | |
| GTSLSPNYTLESTSGNDGKPVSGGGGRGRGRRKRDSGHVSPGTFFDKYSAAPDSGGAP | |
| GVSPGQQQASGAAVGGSSAGETRGAPTPHEKALTSPSWGKGAELLLGDQPDLIGSLDG | |
| GAKSDSSSPNVGEFASDEVSTSYANEDEVSSSSDNPQALVKASRSPLVTGSPKLPPRG | |
| VGAGEHGPKAPPPALGLGIMSNSTSTPDSYGGGGGPGHPGTPGLEQVRTPTSSSGAPP | |
| PDEIHPLEILQAQIQLQRQQFSISEDQPLGLKGGKKGECAVGASGAQNGDSELGSCCS | |
| EAVKSAMSTIDLDSLMAEHSAAWYMPADKALVDSADDDKTLAPWEKAKPQNPNSKEAH | |
| DLPANKASASQPGSHLQCLSVHCTDDVGDAKARASVPTWRSLHSDISNRFGTFVAALT | |
| (SEQ ID NO: 88) | |
| 1 | gttgctgctt ctcccggcgc tgggcgagag gcagacacag agaggggagc cgagaccctc |
| 61 | ggaacgcccc acgcagagcc cccccgctag tcgggagagg ggtgcgcaga ccccccagag |
| 121 | ctgcccccgc gcccccctcc ccccattccg ggctctgaga gcgcagcggg aacgccttag |
| 181 | cctgctcgcc cggcgtggcc ccccgacccg cgtacgcccc cctccctcag gtccgagagg |
| 241 | gactcgcgaa gcacctcagc gcggaggcag ggaaccggag ccttggagcg acccaacccc |
| 301 | tcgtctcgct gccctcccgc gcctgcaacg gtgcgcggag actccggcga actcagacac |
| 361 | ccaacggcgg agaacagaag cggcaggcgg cggacgtggc cgcgaagctg cgcgccgaac |
| 421 | gcagcgcacc cgctgccgag cagaggagcc gcgcctttcc ccgaccctcg gctccagccc |
| 481 | ccggcgcctg ccgcctcgca gcccctctgc gtcctcggct cgggggccgg caccggcgat |
| 541 | gccgagcgga gcctccagtc ctccgacccg ctgaagaagc agcagccgct cgcccggagc |
| 601 | ctacggggat tgtgcgagcg gatcgtgctc ggtggaggct cgggctgcgg ggcgcgggga |
| 661 | ctccgggggg cggggggagg gaccgctctg tcggtgcccg gcgccagccg cggctttgaa |
| 721 | gggtctccct cccctgccct tagcagctct gccacggact ccgggaggct gcgggcggcg |
| 781 | tcctgagggc tccccagcag acccaatcgg acttgagaag gtgatcgctc tgctctccca |
| 841 | acccccttcc ctccccattc cccccactta actttttgtc tccgttcatc cgcggcttcg |
| 901 | tcccctcccc gcagacccac ccgcggctgt gacaaccgcc cggggcatgg gccccccaac |
| 961 | acggctccta gaggccccgc ggcctcgcaa gatgagagag gccctccccg ggcagaatcg |
| 1021 | gagcttcagg agaggagcta ataccccgcc ccccgtccct cacatcaggc ggggtggagg |
| 1081 | tgcgcgctga gcccccgcgg tgctgagcgt cccggagcgc ccaatcctgg gctggaacga |
| 1141 | gtagctggcc ggaggcgcgc cgcggagagc cggctgtcat gccctattga tccccctctg |
| 1201 | ccccccgcca agtatgtttg ggctggacca attcgagccc caggtcaaca gcaggaacgc |
| 1261 | tggccagggc gagaggaact ttaacgagac cggactgagc atgaacaccc actttaaggc |
| 1321 | cccggctttc cacactgggg ggccccctgg ccctgtggat cctgctatga gcgcgctggg |
| 1381 | cgaacccccg atcttgggca tgaacatgga gccctacggc ttccacgcgc gcggccactc |
| 1441 | ggagttgcac gcaggggggc tgcaagcgca gcctgtgcac ggcttctttg gcggccagca |
| 1501 | gcctcaccac ggccacccgg gaagtcatca tccccaccag catcaccccc actttggggg |
| 1561 | caacttcggt ggcccggacc ccggggcctc gtgcctgcac gggggtcgcc tgctcggcta |
| 1621 | cggcggcgca gccggaggcc tgggcagcca gccgcccttc gccgagggct atgagcacat |
| 1681 | ggcggagagc caggggcctg agagcttcgg cccgcagcga ccggggaacc tcccggactt |
| 1741 | ccacagttca ggtgcctcca gccacgccgt gccggcccca tgcctgccgc tggaccagag |
| 1801 | ccctaaccga gccgcctcc: tccacggcct gccgtcctcc agcggctccg attcccacag |
| 1861 | tctggagcca cggagggtga cgaaccaagg agccgtcgac tcgctggaat acaattaccc |
| 1921 | gggcgaggcg ccctcgggac attttgacat gttttcgccc tctgactccg aagggcagct |
| 1981 | gcctcattat gcagcgggtc gccaggttcc tgggggcgct ttcccgggcg cctcggccat |
| 2041 | gcccagagct gcgggcatgg tgggcttgtc caaaatgcac gcccagccac cgcagcagca |
| 2101 | gccccagcag cagcagcagc cccagcagca gcagcagcag catggtgtgt tctttgagag |
| 2161 | gttcagtggg gccagaaaga tgcctgtggg tctggagccc tragtgggct ccaggcaccc |
| 2221 | gttaatgcag cctccccagc aggccccgcc accccctcag cagcagcccc cgcagcagcc |
| 2281 | gccacagcag cagccgccgc cgccacccgg gcttctagtc cgacaaaatt cgtgcccgcc |
| 2341 | tgcgctccct cggccccagc agggcgaggc gggcacgccc agcggcggcc tgcaggacgg |
| 2401 | aggccccatg ctgcccagcc agcacgcgca attcgagtat cccatccacc ggctggagaa |
| 2461 | ccggagcatg cacccttatt ccgagcctgt tttcagcatg cagcatcctc ctccgcagca |
| 2521 | ggcgcccaac cagcggctgc agcatttcga cgcgcccccc tacatgaacg tggccaagag |
| 2581 | gccgcgcttc gactttccgg gcagcgcggg agtggaccgc tgcgcttcgt ggaacggcag |
| 2641 | catgcacaac ggcgctctgg ataatcacct ctccccttcc gcctacccag gcctacccgg |
| 2701 | cgagttcaca ccgcctgtgc ccgacagctt cccttcgggg ccgcccctgc agcatccggc |
| 2761 | cccggaccac cagtccctgc aacagcagca gcagcagcag cagcagcagc aacagcagca |
| 2821 | gcagcagcag caacagcaac agcaacagca gcagcagcag cagcgccaaa acgcggccct |
| 2881 | catgattaag cagatggcgt cgcggaatca gcagcagcgg ctgcgccagc ccaacctggc |
| 2941 | tcagctaggc caccccgggg acgtgggcca gggcggcctg gtgcatggcg gcccggtggg |
| 3001 | cggcttggcc cagccgaact ttgagcgcga aggcggcagc acgggcgccg ggcgtctggg |
| 3061 | caccttcgag cagcaggcgc cgcacttggc gcaagagagc gcgtggttct caggtccgca |
| 3121 | tccgccgccc ggagacctgc tgccccgtag gatgggcggc tcgggtctgc ccgctgactg |
| 3181 | tggcccgcac gaccccagcc tggcgccccc tcctccgcct ggtggctcgg gggtgctgtt |
| 3241 | ccggggccct ctgcaggagc cgatgaggat gcccggagag ggccacgtgc ccgcgctgcc |
| 3301 | ttcaccgggc ctgcagttcg ggggcagtct gggaggcctg ggtcagctgc agtcgcccgg |
| 3361 | ggcgggcgtg gggctcccca gcgctgcttc ggagcgccgg cccccgccgc cggactttgc |
| 3421 | tacgtctgcg ctcgggggcc agccgggctt tccgtttggt gcagccggcc ggcagtccac |
| 3481 | gccgcacagc ggtccaggcg tgaactcgcc ccccagcgcg ggagggggcg gtggcagctc |
| 3541 | tggtggcggc ggtggcgggg gtgcctaccc gccgcagcct gatttccagc ccagccagcg |
| 3601 | cacctcggcc agtaaattgg gcgcgctctc gctgggctcc ttcaacaagc ccagctccaa |
| 3661 | ggacaacctg ttcggccaga gctgcctggc tgcgctctcc accgcttgcc agaacatgat |
| 3721 | cgccagcctc ggggccccca acctcaacgt gaccttcaac aagaagaacc cgccagaggg |
| 3781 | caagaggaaa ctgagccaga acgagaccga cggcgcggca gtggccggca acccgggctc |
| 3841 | ggattacttc ccaggaggga ctgctcctgg ggccccagga cccggaggcc cgtccgggac |
| 3901 | cagtagcagc ggctccaaag cctcggggcc gcccaaccct ccagcccagg gggacggcac |
| 3961 | cagcctctcc cccaactaca ccctggaatc cacgtcgggg aatgacggca agccggtctc |
| 4021 | cgggggcggc ggccggggac ggggtcgcag aaaaagggac agtggtcacg tgagccctgg |
| 4081 | caccttcttt gacaagtact cggcggctcc ggacagcggg ggcgcacctg gggtgagccc |
| 4141 | agggcagcag caagcgtcag gcgcagccgt cgggggaagc tccgcaggcg agacgcgcgg |
| 4201 | ggcaccgacg ccccacgaaa aggcgctcac gtcgccatcc tgggggaagg gggctgagtt |
| 4261 | gctcctgggg gatcagccgg acctcattgg gtccctggac ggcggggcca agtcggacag |
| 4321 | tagttcgcca aacgtgggtg agttcgcctc ggacgaggtg agcacgagct acgccaatga |
| 4381 | ggacgaggtg ttgtccagct ctgacaaccc ccaggcacta gttaaagcga gcaggagtcc |
| 4441 | cctggtgacc ggctcgccca aactccctcc ccgtggggta ggcgccgggg aacacggacc |
| 4501 | gaaggcgccc ccgcccgccc tcggcctggg catcatgtct aactctacct cgacccctga |
| 4561 | cagctacggc ggcggtgggg gcccgggcca tccgggcact ccgggcctgg agcaggtccg |
| 4621 | caccccgacg agcagcagcg gcgccccgcc acccgacgag atccaccccc tggagatcct |
| 4681 | tcaggcgcag atccagctac agaggcagca gttcagcatc tccgaggacc agcctctggg |
| 4741 | gctgaagggt ggcaagaagg gtgagtgcgc cgtcggggcc tcaggggcgc agaatggcga |
| 4801 | cagcgagctg ggcagctgct gctccgaggc ggtcaagagc gccatgagca ccattgacct |
| 4861 | ggactcgctg atggcagagc acagcgctgc ctggtacatg cccgctgaca aggccctggt |
| 4921 | ggacagcgcg gacgacgaca agacgttggc gccctgggag aaggccaaac cccagaaccc |
| 4981 | caacagcaaa gaagcccacg acctccctgc aaacaaggcc tcagcatccc agcctggcag |
| 5041 | ccacttgcag tgcctgtctg tccactgcac agacgacgtg ggtgacgcca aggctcgagc |
| 5101 | ctccgtgccc acctggcggt ccctgcattc tgacatctcc aacagatttg ggacattcgt |
| 5161 | ggctgcccta acttgaatga caagaaagat cccctcctct accaggccct tcctctcccc |
| 5221 | ctgtctgttt ccttccccct caaccttacc ccacccctct gttaatttga aagggccact |
| 5281 | attgctgagt ggatgagttt tttttttttc tctaggttgg tacctgctta gtggcatatg |
| 5341 | gaccggaaag ggttaattta aaggggggga acctcaaaag tttttttaaa aaagaaactt |
| 5401 | gtctgccaca gtatgttacc agtgttaacc cttctgcagt tagcaaactt ttgcttaagc |
| 5461 | ctttttcctc tagatactcc ccatgtttcg gtaatcttgg catacatttt ttagatgacc |
| 5521 | tctttccttg ttttgttttc atgctgctgt atgtccaagt attgttattt cataataaga |
| 5581 | caagagttgc tttctttttt attctttttc cttttcttac cccctcccct tttattttct |
| 5641 | ttttgctttg ttcactgctt attaaaatgg aaatcctgga gaatagtagt tctggaatat |
| 5701 | tgccgggtga aagtccaatt gtcatcacaa tgttatatat tgacacccca gtgtcatcag |
| 5761 | tcaggcagga gccaaacaat gaatgcccct cttaggtatt ccgcctggga ttttgttttg |
| 5821 | tctgttccct aagaaaatat attttcattc ctgcaaacac agtgctcagc cttcagttcc |
| 5881 | cttccacttg agttctctct tctcctgctg gaagccgccc ctctctgcga tcgacgtgag |
| 5941 | gacgtgtcca gctctgctct gtgggaagga gttggaatgt tcgacagcag tgttttctct |
| 6001 | ccttttctgg gcctcctcgc aaatgcccag gccctgcatt ttcacgctgt gctaagcagc |
| 6061 | ctttggtctg catgggggat ggtgtgctcc cagcctgcag tctttggagc aaggctgctg |
| 6121 | cccgtgcctt gggtgctgga gttggaggag gctgttctca gccctttccc ttttctgaaa |
| 6181 | gctgttcctg gccgggcatc ccagggaaga aggaggggac tgcgtgtatc tcctccacct |
| 6241 | ctcccattcc atccccagtc cagcctgggc aaccccaccc ctgggaggga tgaggcaccc |
| 6301 | tcttgctcag cctgctcagc cttctctgag cctttgcagg gatctgcaga ctcctgaggg |
| 6361 | ctagaggaca gagaaagaga atagaatgaa atgactttga ttcctgcgcc ttttagtttt |
| 6421 | gaactctgga attcctctgc cccctcccca acattttttt ggaatctcac cctgttgcaa |
| 6481 | aactagagcc atgtcccaag catctcacaa aggaataact gctctgagca gagatgagtg |
| 6541 | gtggttggca ggggcaggca actttgggtg ctgctgatgc ctgcaaaagc catttatggc |
| 6601 | ttgtggtggg gggcacatag attccccggt gggttagaca ggaagtaact gatatcactt |
| 6661 | cacccaaata tataaccgtg atggttatct atttaatttc agtttttgtt aacgagcgtg |
| 6721 | tcttactaaa acgctccact ttgagctccc ccaccccctc caggtcctca gagtttgcag |
| 6781 | atctgggctt tctaaagcaa gtgacctgaa ggctctgggc tcaccataca acacccacgt |
| 6841 | tgtttatttc aaagaacttt tcagcgaagg gagaggagct ttcagaaaaa cctcactctt |
| 6901 | tcccctccct tctcccctct ttccttctgc cggtcctttt ggctggggtc tgagtctgcg |
| 6961 | gttctcgcct gggcagtctt gacgaggagc aaaccccgcc ttcagagggc agacaaagca |
| 7021 | ggtggcatga attgatcagc gagaaaggtg tgagccgagg cagttcctgc gttctgctac |
| 7081 | aaaaggaatg gaaagggaag ggaatttccc cccaccatgg gctgtgggag agttgaccgt |
| 7141 | attctgggca agactccatg acccctctga ttctgcagtg tacagctgtt tgagagcctc |
| 7201 | atcattttac ttttgaaaca ggaatgattt ctccttaatt gcttaaggcc ggggagcaaa |
| 7261 | gtgtcttaac ttctgtcttt gactttccca gcgttgagtc atcaacactt tgccaattag |
| 7321 | ctcatggtcc tggcaacctc agaaacccct gaagttttaa aaactttctc gctccccacg |
| 7381 | accccagaat gaaacagctt taaaaatagc cttaagcaaa aggatgttat ttcattaaat |
| 7441 | ttggtttaat ggaaagaata aaagtaaatg aaaaacacac cctacacact agactccgaa |
| 7501 | cactggtaat cagtactgca tagcaaactc tttgggaaag aaaacgaaaa tgttattgca |
| 7561 | catgtaaaat atgaaaactt aactctgctg tgtgttaggc aatcctgtaa tcttttttga |
| 7621 | ctcttaaaag aaattcattt ctgaaatgct tggttggaag actgtgacaa tagctcatga |
| 7681 | aattgagtgt tatttttttc tttctttttt aaaaaaatat gtaaagtgca gtcttctgta |
| 7741 | ttcctgcata ttgtatatac ctgtatatgt tttcctgagc agttaaataa caataaatat |
| 7801 | gacgttaatg gtga |

[0108] An amino acid sequence for the protein (Mediator complex subunit 19 (Med19)) encoded by the MED19 gene that is a regulator of T cell exhaustion/dysfunction resistance is available from the UniPROT database at accession no. A0JLT2 or accession number NP_001304007 or NP_703151. cDNA NM_153450 or NM_001317078 with gene location at Chr 11: 57.7-57.71 Mb.

| (SEQ ID NO: 89) | |
|---|---|
| MENFTALFGAQADPPPPPTALGFGPGKPPPPPPPPAGGGPGTAP | |
| PPTAATAPPGADKSGAGCGPFYLMRELPGSTELTGSTNLITHYNLEQAYNKFCGKKVK | |
| EKLSNFLPDLPGMIDLPGSHDNSSLRSLIEKPPILSSSFNPITGTMLAGFRLHTGPLP | |
| EQCRLMHIQPPKKKNKHKHKQSRTQDPVPPETPSDSDHKKKKKKKEEDPERKRKKKEK | |
| KKKKNRHSPDHPGMGSSQASSSSSLR | |
| (SEQ ID NO: 90) | |
| 1 | ggcagacacg gagacagcgc cggggcggag ggtacgatgg agaatttcac ggcactgttt |
| 61 | ggggctcagg ctgacccacc accgccccca accgcactcg gcttcggacc aggaaagcct |
| 121 | ccacccccgc caccgcctcc tgcgggcggg ggacccggca cggccccgcc tcccaccgcg |
| 181 | gccacggctc ctcctggcgc ggacaagtca ggagctggct gtggcccttt ttacctcatg |
| 241 | agggaactgc caggtagcac agagctgaca ggcagcacga atctgatcac acactacaac |
| 301 | ttggaacaag cctataataa attctgtggg aagaaggtga aggagaagct aagtaacttc |
| 361 | ctgcctgacc tgccagggat gattgatctg cctggttccc atgataacag cagcctccgc |
| 421 | tctctcattg agaagccccc tattctcagt agctctttca atcctatcac agggaccatg |
| 481 | ctggccggct tccgcctcca cactggcccg ttgccggagc agtgtcgtct gatgcatatt |
| 541 | cagcctccca agaagaagaa taagcacaag cacaaacaga gccgtaccca ggatcctgtc |
| 601 | cccccagaaa caccatctga ttcagatcac aagaagaaga aaaagaaaaa agaagaggat |
| 661 | cctgaacgga aaaggaagaa gaaagagaag aagaaaaaga agaatcgaca tagtccagac |
| 721 | cacccaggta tgggcagctc ccaggccagc agcagcagca gcctacgcta ataggaccac |
| 781 | tggactcttt gccaggatgg cttttcctgc tgtactgaac ctgctgataa aagctgcctt |
| 841 | ccaggctctt ggacactgcc ttgggagcat cctgcagctg ggacagaggc cagctcctgt |
| 901 | tgggctcagt tgagactaag taaattagga gagagaggga catgcttttg taggctcatc |
| 961 | ccagttggtt ttctcatgga catctcttcc tctcccagga agcttacaat tttcttctct |
| 1021 | ctcttttgtg caatttgtct gatttaggac ttgttctgtg ttttctttaa aaaaaaaaaa |
| 1081 | attacattta tcaaactgg |

[0109] An amino acid sequence for the protein (Homeobox protein MOX-1) encoded by the MEOX1 gene that is a regulator of T cell exhaustion/dysfunction resistance is available from the UniPROT database at accession no. P50221 or accession number NP_001035091, NP_004518 or NP_054705, cDNA NM_001040002, NM_004527 or NM_013999 with gene location at Chr 17: 43.64-43.66 Mb.

| (SEQ ID NO: 91) | |
|---|---|
| MDPAASSCMRSLQPPAPVWGCLRNPHSEGNGASGLPHYPPTPFS | |
| FHQKPDFLATATAAYPDFSASCLAATPHSLPQEEHIFTEQHPAFPQSPNWHFPVSDAR | |
| RRPNSGPAGGSKEMGTSSLGLVDTTGGPGDDYGVLGSTANETEKKSSRRRKESSDNQE | |
| NRGKPEGSSKARKERTAFTKEQLRELEAEFAHHNYLTRLRRYEIAVNLDLSERQVKVW | |
| FQNRRMKWKRVKGGQPISPNGQDPEDGDSTASPSSE | |
| (SEQ ID NO: 92) | |
| 1 | agccctctgc aggcatttgc tctgggctcc aggacgaact cctcgtcagc tggtgcgtct |
| 61 | gggttgggac agtgaaaatg tttagtgtca ttggcgacaa atacacatac aggggatccc |
| 121 | agtaggtagg ctggtgcatt ggaggggcag gagcaagccc gacataggtg tgtgcacaca |
| 181 | cataggagta gctggccaca tgtgtgtgta ctttaaggag agactttagt tttgggtttt |
| 241 | tttttttttt tggttcctgg ggtaaatttt ctgttgaaca tttttccctc ctatttagtt |
| 301 | ttttttcttt tgcattttta aaaatttgaa cataaaaagt ataaagaatc aaatctttga |
| 361 | aaggaccgag gcgtgcagcg gacagcagat ggatcccgcg gccagcagct gcatgaggag |
| 421 | cctccagccc ccagcccctg tctggggctg ccttcgaaac ccccactcgg aaggcaatgg |
| 481 | ggcctcaggg ctaccccact acccgcccac cccgttctcc ttccaccaga aaccagactt |
| 541 | cctggcgaca gcgacggcag cgtaccctga cttctcagcc tcctgcctgg cagccacccc |
| 601 | acacagcctg ccccaggagg agcacatctt cactgagcag caccccgctt tcccacagtc |
| 661 | ccccaactgg cacttccctg tctcagacgc ccggcgcagg cccaactcag gcccggcagg |
| 721 | gggttccaag gaaatgggga ccagcagcct gggcctggtg gacaccacag gaggcccagg |
| 781 | cgatgactac ggggtgcttg ggagcactgc caatgagaca gagaagaaat catccaggcg |
| 841 | gagaaaggag agttcagaca accaggagaa cagagggaag ccggagggca gcagcaaagc |
| 901 | ccgraaggag aggacggcct tcaccaagga gcagctgcga gagctggagg cagagtttgc |
| 961 | ccatcataac tacctgactc ggctccgcag atatgagatt gcggtaaacc tggacctctc |
| 1021 | tgagcgccag gtcaaagtgt ggttccagaa ccgaaggatg aagtggaagc gtgtgaaggg |
| 1081 | aggtcagccc atctccccca atgggcagga ccctgaggat ggggactcca cagcctctcc |
| 1141 | aagttcagag tgagattctg catggaggaa aaatgactaa ggactgagcc ccctacccaa |
| 1201 | ctacccccac cccaatccca ccttcaccct cttccttccc cagccagggc agcctctcca |
| 1261 | catctttccc tgactcttgg atatgaaact gcccagcatt cctgggagtc ttaggatttt |
| 1321 | ctaggaagtt ctgtccagcc tcttagcagc ctcttcccta gggcctttgc tcccacactc |
| 1381 | tcatggaatc agacagagat cctaccgggc cggatgaatc tggaaacagc ttcagagata |
| 1441 | ctgcttctca gcgtctcttg gctgccaccc atgcctcctc ctaccgctgt tctcctaggt |
| 1501 | cagccaggcc tcctcctggt ctggacacca cctggcctgg tgggagagga gctttggaac |
| 1561 | cagctggcga ctcggaaagt aaatgcttca aaaggaagga aatgacagag acacacgccc |
| 1621 | ttgcccacct tcctctgtag gctgcacatc tgaggctttg gggcccctta gttgtcccga |
| 1681 | aaccccaaga aaaatcagaa tgaggagagt caaggacagc aactcagctg ctgcaagcca |
| 1741 | gaaacacatc cctgtctcca aatttgttgg ctaagtggag acacttctga gaactgacta |
| 1801 | gagaagacag aaaaatagcc cgatgtaggt ttcggtgtcc ccatataggc ccgtccacac |
| 1861 | aggcttgact gggtggacaa gaatgaaccc atgacagcac ctgctgcttc aaaatcaaaa |
| 1921 | tcaatttagg gatacagcag gggctgttgg gctgtgctcc agagaaaagg agcagctact |
| 1981 | ccttttaaat ccacgatttc tggattgaaa acctgtccag atgctgagtt gttgggctga |
| 2041 | acaactagga gctgaaaaca acgtagaggc tggaaagtgt cccctgcatt ctggagggga |
| 2101 | ggggagataa taaggagggc tgctgggtga gggcctggag atgtggaacc ctggagtgga |
| 2161 | aggttctcca gtgacagtgt cctgtgactg caaaagggga caagaaaatc cctcttcctc |
| 2221 | catgggatgg atttaagctc ttgctgtgtg ttctacaaat gctgttattg tgggaggaaa |
| 2281 | tgctaggttt ttgtgtgtgg actgcccaga cctcagccag gtcttctgga gatgacattt |
| 2341 | gaggactgat ggccaaagag catgggggac tgaagccctg gctgcctcag cgctctgtct |
| 2401 | cccaacacca gctggtgttg cagagggagg tcaacgtgag tttggatctc ttgtacgcag |
| 2461 | atgtaatcat tcacatgtaa aaataacccc acctccccac cccaaaaagg gcaagagctg |
| 2521 | tggaaaatga ttgccaaatg agatggctgg ttagagcatg attttttcta aagcatactt |
| 2581 | catatatttt cttaagatta catcaagcta attgtgcgag ctcaattcac tttgtaagaa |
| 2641 | aactctcgga gaaataaaat caataaaaag caaa |

[0110] An amino acid sequence for the protein (Adenylyltransferase and sulfurtransferase MOCS3) encoded by the MOCS3 gene that is a regulator of T cell exhaustion/dysfunction resistance is available from the UniPROT database at accession no. 095396 or accession number NP_055299, cDNA NM_014484 with gene location at Chr 20: 50.96-50.96 Mb.

| (SEQ ID NO: 93) | |
|---|---|
| MASREEVLALQAEVAQREEELNSLKQKLASALLAEQEPQPERLV | |
| PVSPLPPKAALSRDEILRYSRQLVLPELGVHGQLRLGTACVLIVGCGGLGCPLAQYLA | |
| AAGVGRLGLVDYDVVEMSNLARQVLHGEALAGQAKAFSAAASLRRLNSAVECVPYTQA | |
| LTPATALDLVRRYDVVADCSDNVPTRYLVNDACVLAGRPLVSASALRFEGQITVYHYD | |
| GGPCYRCIFPQPPPAETVTNCADGGVLGVVTGVLGCLQALEVLKIAAGLGPSYSGSLL | |
| LFDALRGHFRSIRLRSRRLDCAACGERPTVTDLLDYEAFCGSSATDKCRSLQLLSPEE | |
| RVSVTDYKRLLDSGAFHLLLDVRPQVEVDICRLPHALHIPLKHLERRDAESLKLLKEA | |
| IWEEKQGTQEGAAVPIYVICKLGNDSQKAVKILQSLSAAQELDPLTVRDVVGGLMAWA | |
| AKIDGTFPQY | |
| (SEQ ID NO: 94) | |
| 1 | acgacaactt ccggaagagg tcgccatggc ttcccgggag gaggtactcg ccttacaagc |
| 61 | tgaagttgcc caacgtgagg aggaattgaa ttcgctgaag cagaagctgg cgtcggctct |
| 121 | tttggctgag caggaaccgc agccagaacg gctggttccg gtgtcgccgc tgccgccgaa |
| 181 | ggccgctctg tcccgagatg agattctgcg ctatagccgg cagctagtgc tgcccgagct |
| 241 | gggcgtgcac ggacagctgc gcctggggac cgcgtgcgtg ctaatcgtgg gctgcggtgg |
| 301 | gctcggctgt ccactagcgc agtacttggc agcggccggc gtgggccgcc ttggccttgt |
| 361 | ggactatgac gtggtagaga tgagcaacct ggcccgccaa gtgctgcatg gcgaggcact |
| 421 | ggctggccag gccaaggcct tttcggccgc cgcctcgctg cgccgcctca attcggcagt |
| 481 | ggaatgcgtg ccgtacactc aggcccttac gccagccact gccctagacc tggtccgccg |
| 541 | atatgatgtg gtggctgact gctcggacaa cgtgcccact cgctacctgg ttaatgacgc |
| 601 | atgtgtgctg gcgggtcggc ccctcgtgtc tgccagtgcc ttgcgcttcg agggccaaat |
| 661 | cacagtctac cattatgacg gtggcccttg ctatcgctgc atattccccc aaccaccccc |
| 721 | agcggagaca gtgaccaact gcgcggacgg cggggtgctc ggtgtcgtta ccggggtcct |
| 781 | gggctgcctg caggccttgg aagtgctgaa aatcgctgcg ggtctgggcc cctcttacag |
| 841 | tggcagcttg ttgctctttg atgccctgag agggcatttc cgctctattc ggctgcggag |
| 901 | ccgcaggctc gactgtgcag cttgcgggga acggcccact gtgactgatc tgctggacta |
| 961 | tgaagccttc tgtggctcct cagccactga taaatgccgc tccctgcaac tactgagccc |
| 1021 | agaggagcgt gtttctgtca ccgactataa gcgactgctg gattctgggg cattccacct |
| 1081 | gttgctggac gtcaggcctc aggtggaggt ggacatttgt cgtttgcctc atgccctaca |
| 1141 | catccctctg aaacatttgg aacgcaggga tgcggagagc ctgaaactct taaaagaagc |
| 1201 | aatctgggaa gagaagcagg gcacacaaga aggggctgct gtccccattt atgtgatttg |
| 1261 | caaactggga aatgactcac agaaagccgt gaagatcctc cagtccttat cagcagctca |
| 1321 | agagttagac cctttaacag ttcgggatgt tgtggggggc ctcatggcct gggctgccaa |
| 1381 | aatcgatgga acatttccac agtactgagg tgactggtat agtctgatga gaaagatgtg |
| 1441 | gattgccata atacctcaaa gatacacttg tttgcatttt tcggtaatat acataggagc |
| 1501 | tggggattct acagtatctg tgaatacgtg gactcctttt tataaggagt tttaaaaatt |
| 1561 | gttatgtatt ggatgaatga cttattaatg gattataccg tttctgagaa ccatcatttt |
| 1621 | ttttttcagc acacggagga tgtcttggac atgtgagatg taacgtgaca ggattttgca |
| 1681 | ttttaaactg cagatcattt acatgtcctt attttccacc tcccccagtc aaaatgcttt |
| 1741 | ctaaatcatt ttcacagatt atatacttcg gatctgttta ctgttcagtt aagaaattct |
| 1801 | tggatcttat taatatttca gatgatagaa tacatcctac agaaatacat gtttaaaatg |
| 1861 | taaattgttt taattattca gaaagagggt cattctattt ggccttttga attagtatca |
| 1921 | aaatgagatt tttttttttt ttttgagatg gaatctctct ctgttgccca ggctggagtg |
| 1981 | tagtggtgcg atctcagctc actgcaacct ccgcctccca ggttcaagcg attctcctgc |
| 2041 | ctcagcctcc tgagtagctg ggattacagg cgcacgccac cacgcctggc taatttttgt |
| 2101 | atttttagta cagagggggt ttcaccatgt ttgtcaggct ggtctcgaac tcctgacctc |
| 2161 | gtgatccgcc tgcctcgact tcccagagtg ctgggattac aggcgtgagc caccacaccc |
| 2221 | tcccgagatc tttaaagttt accaaaataa aggaaaccac ctttgtagtc tgtcagtgtc |
| 2281 | tcttataaat ttctactgtt ttattaaagt taacttcagg gtccacctta tgttgcacac |
| 2341 | atatcacatc gtttaaattg catactatgg tttgacttgc tttggaattt tcaagtcaaa |
| 2401 | gtcccaaccc tttgcctctc cccctttaat ttgccttttc tcttttgatt taatgttttt |
| 2461 | ttattccagc attttatact aatgtaaaat gtttttatgt ttgtttactt aacattttca |
| 2521 | taaaatagta ggtagtctca ccaacttcca atatatacaa caacattata agtaaaaatt |
| 2581 | tgatttgtga gtgcctatca gtggccagat gaactaatgg cttgtcagaa gggggcctgt |
| 2641 | gacctcctgc ttgctgcatg caggcttata atcaccaatt gctgctgttg tttttttaag |
| 2701 | aatggcagaa atcacagata caactataaa atctttgtat ttctgttaac catttttttt |
| 2761 | aaagcttaaa tgtatcataa gccagcaaaa accccttgta gaccagattt acttaccagt |
| 2821 | ttgcaatttg tgatatagaa tcttgtttta ttataagagg gtggtattta acaaattcaa |
| 2881 | aattagtcat cactttttaa ctgtgaaaca ttgtaactaa ttctttgaac aggtatactt |
| 2941 | aaagtatggt atacccttct gttataaaga tgaagcaggt ctcttatgac tgttcctgcc |
| 3001 | aacgagttat ggaggtaaat gactgtgacc tggagtggag aacaaagatg gctggcctgt |
| 3061 | gtttttcatc tccttcttcc agggacaact gattctgata catagcagga aacaaatagc |
| 3121 | gacacacagg aacaatttca tattctaaag actgaagtcc taaagttata gacagttgta |
| 3181 | gttcctataa acctggttgt cacaggggac aggcaagaga agctgactag ctaagtgtta |
| 3241 | aaaggtttac taaagtgata ggaggtgctt ttgagaattt tggggacaga ttcaaggctg |
| 3301 | tacttctagg aatgatgccc gaaatcatgc acaaaactgg ccttaggaga acagtgtcta |
| 3361 | tgttgtgctg ccctatcaag taccggagga aacgccacta cagtctcacc agtttcactt |
| 3421 | gacgtgcccc cccaactctc ccagaaagcc caacacttca gccacagtcc atgtgtcgag |
| 3481 | aaacagagtc actacattat tcttttctga gtcaagcctt atgagggtgc ctggtaggca |
| 3541 | gagtctaatt acatgcctac atcttagctg caagagaggc tgggaatttg tgttttgata |
| 3601 | tctacaatag gaagacagaa ctcatgatgt gggattttcc caaatagtga aatatttttc |
| 3661 | aaaagatggg ctgttaagaa tataacagat acccagtaca caacccagat ctatttcagt |
| 3721 | atttgttttt tcttgttgtt gttttggaga cagagtctcg ctctatcccc caggctggat |
| 3781 | ggagtgcagc ggcacaatct cggctcactg caacctccac ctcccatgtt caagtgattc |
| 3841 | tcatgcctca gcctcctgag tagctgggat tacaggcacc tgccaccaca tctggctaat |
| 3901 | ttttctattt ttagtagcga tggggtttcg ccatgttggc ctggctggtc ttgaactcct |
| 3961 | gacctcaggt gatctgtgca cctcagcctc ccaaagtgct aggattacag gcatgagtca |
| 4021 | ctgcacctgg catatattag tatttgaaat ttggttttct ctggggattg tagctaggtt |
| 4081 | tttatggtga gataggattc gaacataatt tgttttttga gacgaagtct tgcttcgtcg |
| 4141 | cccagggtgg agtgtagtgt tgtgatcaca gctcgctgtg gcctcaacct cctgggttca |
| 4201 | agtgatcctc ccacctcagc ctctcaagta gcttgaatta cagttgtatg ccaccatgcc |
| 4261 | tagccatttt ttaatttaaa aattttttgg tagcaatggg gtctgaatat gtggcctagg |
| 4321 | ctgatctcaa actcctgggc tcaagcatcc ctcctgcctc agcctcccaa agtgcttggg |
| 4381 | attacgggta tgaggcacca tgcccagcct gaacttgatt tttttgttgt ttccttttca |
| 4441 | taacaaacat caaatgcctt cagtgtacta gttcctctag gttctggaat aaaaatgagc |
| 4501 | aagaggtttc ctgttgtaga ggagtttata tttaaatggt gataagtaaa ttactgataa |
| 4561 | gtgccataaa agaaatgaaa ctgtgacata ttagggtggg ggaggggatc tgttttgaat |
| 4621 | agcttaatta tggaaggcct cagagatgac attaaaccca aaacctgaaa ggtgagaaag |
| 4681 | agccagttac agaagatctg aggaaaattc tatactggga gaaaaataac tgtaaagacc |
| 4741 | tcaaggtaaa taaacttgga atgttccgtt caagaaactg cagaggcaag ttgggttgca |
| 4801 | aacaattagg gagagtggga cagggtgagg tttgagaagc agggaacatc ataaactttg |
| 4861 | tagaccatag tagtttggtt tttattctaa atacaataat agctaatatt ttgagcactt |
| 4921 | actgtgttat ttgggatttg aatccagatg ctctggttga agagcccatt ccctaagtgt |
| 4981 | catgctatac tgactctaag caaaactttg ccattgcttc atatgtgttc atgccctgtc |
| 5041 | agggcataga aagcaatcta tgtcctgaca atcacggaag tgtattccag atacaataga |
| 5101 | aatgtactct ga |

[0111] An amino acid sequence for the protein (NAD(P)H dehydrogenase, quinone 2, also known as QR2) encoded by the NQO2 gene that is a regulator of T cell exhaustion/dysfunction resistance is available from the UniPROT database at accession no. P16083 or accession number NP_000895, NP_001277150, NP_001277151 or NP_001305869, cDNA NM_000904, NM_001290221, NM_001290222 or NM_001318940 with gene location at Chr 6: 2.99-3.02 Mb.

| (SEQ ID NO: 95) | |
|---|---|
| MAGKKVLIVYAHQEPKSFNGSLKNVAVDELSRQGCTVTVSDLYA | |
| MNLEPRATDKDITGTLSNPEVFNYGVETHEAYKQRSLASDITDEQKKVREADLVIFQF | |
| PLYWFSVPAILKGWMDRVLCQGFAFDIPGFYDSGLLQGKLALLSVTTGGTAEMYTKTG | |
| VNGDSRYFLWPLQHGTLHFCGFKVLAPQISFAPEIASEEERKGMVAAWSQRLQTIWKE | |
| EPIPCTAHWHFGQ | |
| (SEQ ID NO: 96) | |
| 1 | gcaggttccg ggctgcttag gttggcaccg gtccgtggtc cccgggggcg cagtcgcagc |
| 61 | gctcccgccc tccaggcgtc agcgagtgcg cggtccagtg cggccggaac ctggcgcaac |
| 121 | tcctagagcg gtccttgggg agacgcgggt cccagtcctg cggctcctac tggggagtgc |
| 181 | gctggtcgga agggggatgg agacagaagt cacaaactca catgccacca gccatatgat |
| 241 | gtaaacatgt aaactgggcc aaggaataca aaagggagtg gtgagctggg gacactgaag |
| 301 | aatggatgcc ctgtctagag gagtgaaaat gaagcatttc atacaaacaa catgatttcg |
| 361 | ggcaatcact ttgggaatca ggataaggtg ttcccccagt ctgcagaaac actggcaaca |
| 421 | tttacaaagc tttaggttca ttcttgtaag tgttgctggt gtcagaatag gaacctccct |
| 481 | gcgctttgaa gggatgaatg tgacctctcc cacattctcc ggtgctgtga tgtaccttaa |
| 541 | acacagcaag ggcacctggc ctgggtggag cccactcctc agcacccacc tcacttcttg |
| 601 | cagtattctg cagaccccag ccctgtgcct gtgctcctgg acagctggag ataaggagtg |
| 661 | ggccctggaa gatgctcatt caggccctgc traagattcc agtcctgatt gctggactcg |
| 721 | ctgaagagag actacgcagg aaagccccag ccacccatca aatcagagag aaggaatcca |
| 781 | ccttcttacg ctatggcagg taagaaagta ctcattgtct atgcacacca ggaacccaag |
| 841 | tctttcaacg gatccttgaa gaatgtggct gtagatgaac tgagcaggca gggctgcacc |
| 901 | gtcacagtgt ctgatttgta tgccatgaac cttgagccga gggccacaga caaagatatc |
| 961 | actggtactc tttctaatcc tgaggttttc aattatggag tggaaaccca cgaagcctac |
| 1021 | aagcaaaggt ctctggctag cgacatcact gatgagcaga aaaaggttcg ggaggctgac |
| 1081 | ctagtgatat ttcagttccc gctgtactgg ttcagcgtgc cagccatcct gaagggctgg |
| 1141 | atggataggg tgctgtgcca gggctttgcc tttgacatcc caggattcta cgattccggt |
| 1201 | ttgctccagg gtaaactagc gctcctttcc gtaaccacgg gaggcacggc cgagatgtac |
| 1261 | acgaagacag gagtcaatgg agattctcga tacttcctgt ggccactcca gcatggcaca |
| 1321 | ttacacttct gtggatttaa agtccttgcc cctcagatca gctttgctcc tgaaattgca |
| 1381 | tccgaagaag aaagaaaggg gatggtggct gcgtggtccc agaggctgca gaccatctgg |
| 1441 | aaggaagagc ccatcccctg cacagcccac tggcacttcg ggcaataact ctgtggcacg |
| 1501 | tgggcatcac gtaagcagca cactaggagg cccaggcgca ggcaaagaga agatggtgct |
| 1561 | gtcatgaaat aaaattacaa catagcta |

[0112] An amino acid sequence for the protein (PR domain zinc finger protein 14) encoded by the PRDM14 gene that is a regulator of T cell exhaustion/dysfunction resistance is available from the UniPROT database at accession no. Q9GZV8. cDNA NM_024504.4 with gene location at 55 Chromosome 8: 70,051.651-70.071,693.

| (SEQ ID NO: 97) | |
|---|---|
| MALPRPSEAVPQDKVCYPPESSPQNLAAYYTPFPSYGHYRNSLATVEEDFQPFRQLEAAASAAPAMPPFPFRMAPPL | |
| LSPGLGLQREPLYDLPWYSKLPPWYPIPHVPREVPPFLSSSHEYAGASSEDLGHQIIGGDNESGPCCGPDTLIPPPP | |
| ADASLLPEGLRTSQLLPCSPSKQSEDGPKPSNQEGKSPARFQFTEEDLHFVLYGVTPSLEHPASLHHAISGLLVPPD | |
| SSGSDSLPQTLDKDSLQLPEGLCLMQTVFGEVPHFGVFCSSFIAKGVRFGPFQGKVVNASEVKTYGDNSVMWEIFED | |
| GHLSHFIDGKGGTGNWMSYVNCARFPKEQNLVAVQCQGHIFYESCKEIHQNQELLVWYGDCYEKFLDIPVSLQVTEP | |
| GKQPSGPSEESAEGYRCERCGKVFTYKYYRDKHLKYTPCVDKGDRKFPCSLCKRSFEKRDRLRIHILHVHEKHRPHK | |
| CSTCGKCFSQSSSLNKHMRVHSGDRPYQCVYCTKRFTASSILRTHIRQHSGEKPFKCKYCGKSFASHAAHDSHVRRS | |
| HKEDDGCSCSICGKIFSDQETFYSHMKFHEDY | |
| (SEQ ID NO: 98) | |
| 1 | gcccgaagtc taccgagccc gagcggccta ccgagcccga gtggccccgc agcgtccagg |
| 61 | aggcgcccgc tccgcggtgg cgctcttgga ggtggtgtcg gagagccgcc gagcgtgcgg |
| 121 | tcccgggatg gctctacccc ggccaagtga ggccgtgcct caggacaagg tgtgctaccc |
| 181 | gccggagagc agcccgcaga acctggccgc gtactacacg cctttcccgt cctatggaca |
| 241 | ctacagaaac agcctggcca ccgtggagga agacttccaa cctttccggc agctggaggc |
| 301 | cgcagcgtct gctgcccccg ccatgccccc cttccccttc cggatggcgc ctcccttgct |
| 361 | gagcccgggt ctgggcctac agagggagcc tctctacgat ctgccctggt acagcaagct |
| 421 | gccaccgtgg tacccaattc cccacgtccc cagggaagtg ccgcccttcc tgagcagcag |
| 481 | ccacgagtac gcgggtgcca gcagtgaaga tctgggccac caaatcattg gtggcgacaa |
| 541 | cgagagtggc ccgtgttgtg gacctgacac tttaattcca ccgccccctg cggatgcttc |
| 601 | tctgttacct gaggggctga ggacctccca gttattacct tgctcaccca gcaagcagtc |
| 661 | agaggatggt cccaaaccct ccaaccaaga agggaagtcc cctgctcggt tccagttcac |
| 721 | ggaggaggac ctgcacttcg ttctgtacgg ggtcactccc agcctggagc acccagccag |
| 781 | cctgcaccat gcgatttcag gcctcctggt ccccccagac agctctggat ctgattctct |
| 841 | tcctcaaact ctggataaag actcccttca acttccagaa ggtctatgcc tcatgcagac |
| 901 | ggtgtttggt gaagtcccac attttggtgt gttctgcagt agttttatcg ccaaaggagt |
| 961 | caggtttggg ccctttcaag gtaaagtggt caatgccagt gaagtgaaga cctacggaga |
| 1021 | caattctgtg atgtgggaga tctttgaaga tggtcatttg agccacttta tagatggaaa |
| 1081 | aggaggtacg gggaactgga tgtcctatgt caactgtgcc cgcttcccca aggagcagaa |
| 1141 | cctagttgct gtgcagtgtc aagggcatat attttatgag agctgcaaag agatccatca |
| 1201 | gaaccaagag ctccttgtgt ggtatggaga ctgctatgag aaatttctgg atattcctgt |
| 1261 | gagccttcag gtcacagagc cggggaagca gccatctggg ccctctgaag agtctgcaga |
| 1321 | aggctacaga tgtgaaagat gtgggaaggt atttacctac aaatattaca gagataagca |
| 1381 | cctcaagtac accccctgtg tggacaaggg cgataggaaa tttccctgtt ctctctgcaa |
| 1441 | acgatccttt gagaagcggg accggcttcg gatccacatt cttcatgttc atgagaagca |
| 1501 | ccggcctcac aagtgttcta catgtgggaa atgtttctct caatcttcca gcctaaacaa |
| 1561 | acacatgcga gtccactctg gagacagacc ataccagtgt gtgtattgta ctaagaggtt |
| 1621 | cacagcctcc agcatactcc gcacacacat caggcagcac tccggggaga agcccttcaa |
| 1681 | atgcaagtac tgtggtaaat cttttgcatc ccatgctgcc catgacagcc atgtccggcg |
| 1741 | ttcacacaag gaggatgatg gctgctcatg cagcatctgt gggaaaatct tctcagatca |
| 1801 | agaaacattc tactcccaca tgaagtttca tgaagactac tagccctgcc aggcacaatg |
| 1861 | actcacgcct gtaatcccag cactttggga ggcagaggtg ggtggatcac tcaagtccag |
| 1921 | gagttcgaga ccagcctggg caacatggtg aaatcctgtc tctaccaaaa aaatacaaaa |
| 1981 | atcagctggg ggtggtggca catgcctgtg gttccagcca ctcaggaggt cgaggtggca |
| 2041 | ggatggtttg agcacaggag acggaggttg ctgtgagctg agatcgcccc actgcttttc |
| 2101 | aacctgggtg acagaaccag accctgtctc aaaacaaaac aaaacaaaaa aaatgagtag |
| 2161 | ccctcaagag tgtggagaca atgtaaaaac aagagattcg gattctctct atttcctttt |
| 2221 | atgggttata gaagtccctg cagttggctg tgtgtggtgg ctcacgcct |

[0113] An amino acid sequence for the protein (Synaptonemal complex central element protein 1-like) encoded by the SYCE1L gene that is a regulator of T cell exhaustion/dysfunction resistance is available from the UniPROT database at accession no. A8MT33, cDNA NM 001129979.3 with gene location at Chromosome 16.

| (SEQ ID NO: 99) | |
|---|---|
| MAGKLKPLNVEAPEATEEAEGQAKSLKTEDLLAMVIKLQKEGSLEPQIEDLISRINDLQQAKKKSSEELRETHSLWE | |
| ALHRELDSLNGEKVHLEEVLGKKQEALRILQMHCQEKESEAQRLDVRGQLEDLMGQHKDLWEFHMLEQRLAREIRAL | |
| ERSKEQLLSERRLVRAKLREVERRLHSPPEVEGAMAVNDGLKAELEIFGEQVRSAPEVGAGEGEAGPELPRARDEED | |
| PEPPVAAPDAL | |
| (SEQ ID NO: 100) | |
| 1 | accagtcatc aagcgaggct cgcgcgcagg ccccgcgttg gaaaatggcg gggaagctga |
| 61 | aacctctgaa tgtggaggcg ccagaagcta ctgaggaggc tgaagggcaa gccaagtctt |
| 121 | tgaagactga agacttgctg gcaatggtga taaagctgca gaaagaggga agcctggagc |
| 181 | cacagataga ggacctgatt agccggatta atgatcttca gcaagcaaag aagaaatcca |
| 241 | gtgaggaact gagagagacc cacagtctct gggaggccct gcatagggaa ttagactcct |
| 301 | tgaatggaga gaaagtgcac ctagaggagg tcttgggcaa aaagcaagag gcactgagga |
| 361 | tcctccagat gcactgccaa gagaaggaaa gcgaggctca gaggttggat gtcagaggac |
| 421 | agctggagga tctgatgggc cagcacaagg acctctggga attccacatg ctggagcagc |
| 481 | gactggcccg ggagatccgt gccctggaga gaagcaagga gcagctgctc tcggagagga |
| 541 | ggctggtgcg cgccaagctg cgggaggtgg agcggcggct gcactcgccg cctgaggtcg |
| 601 | agggcgccat ggcggtgaat gacgggctga aggcggagct ggagatattc ggggagcagg |
| 661 | tccggagcgc ccccgaggtc ggggccggcg agggagaggc cggacctgag ctcccccgcg |
| 721 | ctcgcgacga ggaggatccc gagccgccgg tggctgcccc tgacgccctc taggccagca |
| 781 | ggacccgccc gttcccgacc ttccctcgag acccgccaag aaataaaggc gatgatttcc |
| 841 | gaccatgctc gcgttctccg cggagtctgt gctacaccgt ggagcggggc ggggcgtgct |
| 901 | gggatctcga ggcggggcct ctgccggacc cctcccacca gtcgagcccc gggcgccgta |
| 961 | cagaggctgg gtaaatgctc ctgaactcag agagagtaag tgggtgtcag tatcccccgc |
| 1021 | cccacggcct catctcgagc tcccaaacca tctatgt |

[0114] An amino acid sequence for the protein (Synaptotagmin-like 2) encoded by the SYTL2 gene that is a regulator of T cell exhaustion/dysfunction resistance is available from the UniPROT database at accession no. Q9HCH5 or accession number NP_001156423, NP_001156424, NP 001156425, NP_001276537 or NP_001276538, cDNA NP 001156423, NP_001156424, NP 001156425. NP 001276537 or NP 001276538 with gene location at Chr 11: 85.69-85.81 Mb.

| (SEQ ID NO: 101) | |
|---|---|
| MIDLSFLTEEEQEAIMKVLQRDAALKRAEEERVRHLPEKIKDDQ | |
| QLKNMSGQWFYEAKAKRHRDKIHGADIIRASMRKKRPQIAAEQSKDRENGAKESWVNN | |
| VNKDAFLPPELAGVVEEPEEDAAPASPSSSVVNPASSVIDMSQENTRKPNVSPEKRKN | |
| PFNSSKLPEGHSSQQTKNEQSKNGRTGLFQTSKEDELSESKEKSTVADTSIQKLEKSK | |
| QTLPGLSNGSQIKAPIPKARKMIYKSTDLNKDDNQSFPRQRTDSLKARGAPRGILKRN | |
| SSSSSTDSETLRYNHNFEPKSKIVSPGLTIHERISEKEHSLEDNSSPNSLEPLKHVRF | |
| SAVKDELPQSPGLIHGREVGEFSVLESDRLKNGMEDAGDTEEFQSDPKPSQYRKPSLF | |
| HQSTSSPYVSKSETHQPMTSGSFPINGLHSHSEVLTARPQSMENSPTINEPKDKSSEL | |
| TRLESVLPRSPADELSHCVEPEPSQVPGGSSRDRQQGSEEEPSPVLKTLERSAARKMP | |
| SKSLEDISSDSSNQAKVDNQPEELVRSAEDVSTVPTQPDNPFSHPDKLKRMSKSVPAF | |
| LQDESDDRETDTASESSYQLSRHKKSPSSLTNLSSSSGMTSLSSVSGSVMSVYSGDFG | |
| NLEVKGNIQFAIEYVESLKELHVFVAQCKDLAAADVKKQRSDPYVKAYLLPDKGKMGK | |
| KKTLVVKKTLNPVYNEILRYKIEKQILKTQKLNLSIWHRDTFKRNSFLGEVELDLETW | |
| DWDNKQNKQLRWYPLKRKTAPVALEAENRGEMKLALQYVPEPVPGKKLPTTGEVHIWV | |
| KECLDLPLLRGSHLNSFVKCTILPDTSRKSRQKTRAVGKTTNPIFNHTMVYDGFRPED | |
| LMEACVELTVWDHYKLTNQFLGGLRIGFGTGKSYGTEVDWMDSTSEEVALWEKMVNSP | |
| NTWIEATLPLRMLLIAKISK | |
| (SEQ ID NO: 102) | |
| 1 | agtgccgggc gacacccggg ccgtgccgcc agcgtccgtc gggagagtga aggctcgcaa |
| 61 | cgccttgccc gggggaaggt aacgcgccgc gcccggggct gcgcggtttg caccgccagg |
| 121 | ccgagggctg ggggccagaa gacaagagag acggcgaggc gcgctccctg cccggcagcg |
| 181 | actcggaggt aggtgatgct ctgatgctgc tgcctcttat gaattgacga caggtgcaga |
| 241 | gagagaataa actgtgtcta agactggacc agagagtgag tgtgctggaa gccaccatag |
| 301 | gaacaagcga cctgtttggc aaggaataca gcatccttct gagagcctct tctcgacact |
| 361 | atcccacaga ccaggacttc ctcatgggaa agagcactta ggatcttgct atcagctgcc |
| 421 | ctaaactttt gctgagccaa aataagactt thatgcagaa ctgaacaaga tatttcattt |
| 481 | ttgtgtgttt taatcttcct ggttgcagtc ttagttgttc agccctgaga attttgagcc |
| 541 | acatttgttg ctattatttt tgcatgcact tttcaaaatg attgacttaa gcttcctgac |
| 601 | tgaagaggaa caagaggcca tcatgaaggt tttgcagcgg gatgctgctc tgaagagggc |
| 661 | cgaagaagag agagtcagac atttgcctga aaaaattaag gatgaccagc agctgaagaa |
| 721 | tatgagtggc caatggtttt atgaagccaa ggcaaaaagg cacagggaca aaatccatgg |
| 781 | cgcagatatc atcagagcat ctatgagaaa gaagaggccc cagatagcag ctgagcagag |
| 841 | taaagacaga gaaaatgggg caaaggaaag ctgggtgaat aatgtcaaca aagatgcttt |
| 901 | ccttcctcca gagctggctg gcgttgtaga agagccagaa gaagatgcag caccagcaag |
| 961 | cccgagttcc agtgtggtaa atccagcttc cagtgtgatt gatatgtccc aggaaaacac |
| 1021 | aaggaaacca aatgtgtctc cagagaagag gaagaatccg tttaatagct ccaagttgcc |
| 1081 | agaaggtcac tcatcacaac aaactaaaaa tgaacagtca aaaaatggaa gaactggttt |
| 1141 | atttcagact tcaaaagagg atgaattgtc agagtcaaaa gaaaagtcaa ctgtcgcaga |
| 1201 | tacttcaatc caaaagttag agaaatcaaa gcagactttg ccaggccttt caaatgggtc |
| 1261 | ccaaatcaag gctccaatcc ccaaagccag gaagatgatc tacaaatcaa ctgatttaaa |
| 1321 | caaagatgat aaccagtctt ttcctagaca aaggacagac tccctgaaag cgagaggggc |
| 1381 | tccgagaggg atcctcaagc gcaactccag ttccagtagc acagactcag aaacccttcg |
| 1441 | ttataatcac aactttgaac ccaaaagcaa aattgtgtca cctggcctaa ccatccatga |
| 1501 | gagaatttct gagaaggagc attctttaga agacaactct tccccaaact ccctggagcc |
| 1561 | attaaagcat gtgagattct ctgcagtgaa ggatgagctt ccacagagtc ctgggctaat |
| 1621 | ccatggtcgg gaagtaggag aatttagtgt tttagaatct gacagattga aaaatggaat |
| 1681 | ggaagatgca ggggacacag aagagtttca gagtgaccct aagccttctc aatacagaaa |
| 1741 | gccttcgctt tttcatcaat caacctcaag cccatatgta tcaaaaagtg aaacacatca |
| 1801 | gccaatgact tctggttctt ttccaattaa tgggctgcat tctcattcag aagttttaac |
| 1861 | tgcaagacca cagtctatgg agaattcacc aaccatcaat gaacccaaag ataaatcatc |
| 1921 | agaattaaca aggcttgaat ctgtattacc cagaagccct gctgatgaac tgtctcattg |
| 1981 | tgttgagcct gagccatctc aggtgccagg tggcagttct agagaccgtc agcaaggttc |
| 2041 | agaagaagaa cccagtcctg ttttgaaaac tttggaaagg agtgccgcta ggaaaatgcc |
| 2101 | ttccaaaagt ctagaagaca tttcatcaga ttcatcaaat caagcaaaag tagataatca |
| 2161 | gccagaagaa ttagtgcgta gtgctgaaga tgtttccaca gtgcctacac aacctgataa |
| 2221 | tccattttct caccctgaca aactcaaaag gatgagcaag tctgttccag catttctcca |
| 2281 | agatgagagt gatgacagag aaacagatac agcatcagaa agcagttacc agctcagcag |
| 2341 | acacaagaag agcccgagct ctttaaccaa tcttagcagc tcctctggca tgacgtcctt |
| 2401 | gtcttctgtg agtggcagtg tgatgagtgt ttatagtgga gactttggca atctggaagt |
| 2461 | taaaggaaat attcagtttg caattgaata tgtggagtca ctgaaggagt tgcatgtttt |
| 2521 | tgtggcccag tgtaaggact tagcagcagc ggatgtaaaa aaacagcgtt cagacccata |
| 2581 | tgtaaaggcc tatttgctac cagacaaagg caaaatgggc aagaagaaaa cactcgtagt |
| 2641 | gaagaaaacc ttgaatcctg tgtataacga aatactgcgg tataaaattg aaaaacaaat |
| 2701 | cttaaagaca cagaaattga acctgtccat ttggcatcgg gatacattta agcgcaatag |
| 2761 | tttcctaggg gaggtggaac ttgatttgga aacatgggac tgggataaca aacagaataa |
| 2821 | acaattgaga tggtaccctc tgaagcggaa gacagcacca gttgcccttg aagcagaaaa |
| 2881 | cagaggtgaa atgaaactag ctctccagta tgtcccagag ccagtccctg gtaaaaagct |
| 2941 | tcctacaact ggagaagtgc acatctgggt gaaggaatgc cttgatctac cactgctaag |
| 3001 | gggaagtcat ctaaattctt ttgttaaatg taccatcctt ccagatacaa gtaggaaaag |
| 3061 | tcgccagaag acaagagctg tagggaaaac caccaaccct atcttcaacc acactatggt |
| 3121 | gtatgatggg ttcaggcctg aagatctgat ggaagcctgt gtagagctta ctgtctggga |
| 3181 | ccattacaaa ttaaccaacc aatttttggg aggtcttcgt attggctttg gaacaggtaa |
| 3241 | aagttatggg actgaagtgg actggatgga ctctacttca gaggaagttg ctctctggga |
| 3301 | gaagatggta aactccccca atacttggat tgaagcaaca ctgcctctca gaatgctttt |
| 3361 | gattgccaag atttccaaat gagcccaaat tccactggct cctccactga aaactactaa |
| 3421 | accggtggaa tctgatcttg aaaatctgag taggtggaca aatatcctca ctttctatct |
| 3481 | attgcaccta aggaatacta cacagcatgt aaaagtcaat ctgcatgtgc ttctttgatt |
| 3541 | acaaggccca agggatttaa atataacaaa atgtgtaatt tgtgactcta atattaaata |
| 3601 | agatatttga acaagctagg aaaattgaat ttctgctgct gcttcaaaga aaaagctgcc |
| 3661 | ccagagcatt aaacatgggg tattgttaag aagcaaaatg ttcttgtttg ccatcatgtg |
| 3721 | tttcacacca caattctgtg ccacagttaa gagggtctgg tacccttgca ggacctttgt |
| 3781 | aggttgtggg aaaaagtcgc agaaagatac tcaaagtgga gcagggaatg gagacagaca |
| 3841 | tcagtgatga taaaaaaaaa aatggacctt aagaaactat ttactctgta atctctaata |
| 3901 | aaatatggaa ttccatatta gggcaatgag actgaaacta ctggtgtttt tctgccttga |
| 3961 | gaaaacaaac agttaaaaca agcctcaaat gtattttagt gccacccact ggccataggt |
| 4021 | acaattcagt tgttggcttg ttttgactta attctaaaat aggtctcaag cctgtatttt |
| 4081 | tatgagttta tttttttaaa accctgcata tatatgattg tttttcttat aactttacta |
| 4141 | tatgaaagca gcataagagt agtcacaaac atgtcttgca acaaagtttt aattagaatg |
| 4201 | taagttgctc agttatactg ttcttcttat gtatgtaaaa ttttcgtatt ttgtaaaaac |
| 4261 | ccttagaata aattatcatc tgatttaaat tgtattagaa aattagcgtg acttctcatt |
| 4321 | ttaaataaaa tattttagga attctaaa |

[0115] An amino acid sequence for the protein (SRR1-like protein) encoded by the SRRD gene that is a regulator of T cell exhaustion/dysfunction resistance is available from the UniPROT database at accession no. Q9UH36, cDNA NM_001013694.3 with gene location at Chr 22.

| (SEQ ID NO: 103) | |
|---|---|
| MAAAAAAALESWQAAAPRKRRSAARRPRRREAAPRGREAAPRGREAAPRGPEAEFESDSGVVLRRIWEAEKDLFISD | |
| FWSSALETINRCLTKHLEQLKAPVGTLSDIFGNLHLDSLPEESDVATDSIPREILVTGTCHLKCVCYGIGNFATCIV | |
| ARNQLTFLLLLLEKCQIPRSHCWVYDPLFSQLEIEVLNTLGVTVLSENEEGKRSIRGEPTIFYMLHCGTALYNNLLW | |
| SNWSVDALSKMVIIGNSFKGLEERLLARILQKNYPYIAKILKGLEELEFPQTSQYMDIFNDTSVHWFPVQKLEQLSI | |
| DIWEFREEPDYQDCEDLEIIRNKREDPSATD | |
| (SEQ ID NO: 104) | |
| 1 | gacgtcagag accaatggct gcggccgcag ctgcggcgct ggaatcctgg caggcggcgg |
| 61 | ctccgcggaa gaggcgctcc gcggctcgac ggccgcggcg gagggaggcg gcgccccggg |
| 121 | ggagagaggc ggcgccccgg gggagagagg cggcgccccg gggccccgag gcggagttcg |
| 181 | agtctgacag cggagtcgtg cttcgtcgca tctgggaggc tgagaaggac ctgtttatct |
| 241 | ctgatttctg gagttcagca ctagaaacca tcaatagatg tctcacaaaa catctggaac |
| 301 | aactgaaggc ccctgtgggg actctttcag acatctttgg aaacctgcat cttgactcat |
| 361 | tgccagagga gtcagatgtg gccactgatt ctatcccaag agagatcttg gtcacaggaa |
| 421 | cctgccattt gaagtgtgtg tgttacggca ttgggaactt tgccacctgc atcgtagcta |
| 481 | gaaaccagct aacgtttttg ctgcttttgt tggaaaagtg ccagattccc agaagtcact |
| 541 | gttgggtata tgaccctctg tttagccaac ttgaaattga agtccttaac acccttggtg |
| 601 | tgactgttct cagtgagaac gaggaaggga aacggagtat tcgcggggag cctaccatct |
| 661 | tttacatgct ccattgtggg acggccttgt acaacaatct tttatggagt aactggtcag |
| 721 | tagatgccct ttctaagatg gtcatcattg ggaacagttt caaaggactt gaggagaggt |
| 781 | tgttggcaag gattctgcag aaaaattatc cctacattgc aaagatttta aaaggactgg |
| 841 | aggagcttga gtttcctcag acttcacaat acatggacat atttaatgat acctctgtcc |
| 901 | actggttccc tgtgcaaaag ctagaacagc tctccataga tatttgggag tttcgggaag |
| 961 | aaccagatta tcaggactgt gaggaccttg aaatcatcag gaacaagaga gaagatcctt |
| 1021 | ctgctactga ctgaactcgt tgtgaggtac tcagtgttgg ctgaggtaga agctgccacc |
| 1081 | agagactaaa gggaaggctg ctatggagga actacagaga actcctttgc caggaaagaa |
| 1141 | catcaacttg gctgtcctgt tttgaggacg ataccccaca tgaggacttg gtataaagat |
| 1201 | tcctgcccta cgtggcattg tcccatttta catccttccc tcatgacctg gcctgatgtg |
| 1261 | gagtagctcc tgagtaaaga agttaccctt ttgaaggtga tctaaaaata ctgtttattt |
| 1321 | acagtacatc cctcttaggg gcaagtctct gactggttct ggacctgcca cagttcactt |
| 1381 | ggccatgtcg atcaggctcz gcagtgaggt gggcacccac gtcttctcgc cctggacaaa |
| 1441 | gaccactccc cggtcgatgt agatcacaat gcggccaaag gtgtagagct gcttcccttc |
| 1501 | gtgtcgcttc ccaatgacgg gcatgaagac aatgctgtgc tcctcagcct tggtctcaat |
| 1561 | gaggtcctta aagttcatgg gcacagagct agcggccacg ccaatgcccc tctgagccat |
| 1621 | gttctcagcc tcccgcctct cctgcatggc ctcgtactgg aagtccttcc tccgctccgt |
| 1681 | gtgggtgaga taggcaatgt tctcccgtgc tcctggctgc atgtaggcac ctaagataca |
| 1741 | ggaggacagg gcggtgagga gaggtgtttc caggtgtatg gaagttgaca ctgtggcttg |
| 1801 | gcccaggtct tgggtgtgcc agagtgcttg tgactcactg aagggcagct ctgcctcaaa |
| 1861 | gatacaactt tggaggaagt ttagacgact ggccagtatc acataaaaac tgttcagaag |
| 1921 | gttcctggct agtatctagt aaccagatta ttaatattca acattttaaa atgaagtatc |
| 1981 | tgcaagggat ttcttccttc agagctggaa acattaacag agagtcctca gccactcttc |
| 2041 | tgttcccacc ttgctctgta gagtttccat ttcccaccac caaagaggca gcttttagta |
| 2101 | ccttgaaaac atagggccca tactggcttt atttttaacc tacccacaca gggcccccat |
| 2161 | cctgaaagaa gttcacatat atttagggag ctgaaatgag tgtttaaagg ataataccaa |
| 2221 | gaccataaat gctaagtgct aattgagggg tatattcagg gaacagtttt ggaaacatga |
| 2281 | ggccaagggt agctaaggaa gagtttttag aaaaaacttg ataattacag aagcagagaa |
| 2341 | gtatatttgc cttattactt aatctctgtt ttcacagaat aggctatttt tttttttttt |
| 2401 | tttttgagac cgagtctcgc tcttgtcacc taggctggag tgcagtgctt gcaatctcgg |
| 2461 | ctcactacaa cctctgcctc ccaggtttaa gcgattcttc tgcctcagcc tcctaagtag |
| 2521 | ctggcattac aggcatgtgc caccgcgccc ggctaatttt tgcattttta gtagagacgg |
| 2581 | ggtttcacca tgttggtcag gctggtctcg aactcctgac ctcgtgatct acccgcctcg |
| 2641 | gcctcccaaa gtgctaggat tacaggcgtg agccaccgtg cctggcctag gctattaaat |
| 2701 | aacaagaatt aaagactcag gaaatagaaa ttccagttct aactgccacc ctttaactat |
| 2761 | gtgaccttga acaggctctc agcctcgctg ggcttatctg taaaacacag actagacgat |
| 2821 | cccatttcaa tgctgcgaat cggctaatga gcaacactgg agcacaggac tggttgaaat |
| 2881 | aggctcccaa atgtagaaac ataaatatac tctcacttac ttatgatcta ggcagaatga |
| 2941 | cttacctaga acttgggaac agatatagta cacgaacagt gaactgcctg tttttgacaa |
| 3001 | cacagacacc acctattgaa ggctatacac aagcatgaac tcactctccc ttttagccta |
| 3061 | taaagtagat cttactgttt aacaggtaaa atggggctga ttaaggctga gcaatcacca |
| 3121 | agtgtcagac cgcgtgccaa actccacact gtaagatgcg tcacctaagc agcatgctca |
| 3181 | ggcatgaatg agccttaaaa ggccacacag cacagtggtt aagagggcgg ggcctggggt |
| 3241 | tagactgaca tcatctgaat ccagcttaag tcagtctcca ctcagggaag atgcccctct |
| 3301 | cagtcatggt agacctgggc agtgggtgcc agctgaccat gtaccccagt cagcagggtg |
| 3361 | agagtctgtt gctatgtgca aaagtgtgac ctaaggttta ggctgcctac aggaaccaga |
| 3421 | aaactctgat tctgtgtcat ttacatgtgt aaaatctgaa acttggggcc aggacatcca |
| 3481 | aaatgggaat cctcacttac caacgttgga ggacaccgcc cggttcatga tatcaagtgc |
| 3541 | ctcattaaat ttgtccttga cagatggatg tgccagcact tggtctgaga acatcgactt |
| 3601 | ccaacccagg taccacttgg tgatctcctc ataatttggg ctgttactga gccaagagca |
| 3661 | cagcacctgc caaaaagaaa aattacttgc atccatcgtg gcaacaaatg aaggcaagat |
| 3721 | ttctgaagtg gccatttgtt ttgttttgat cctggtccta caggctagtg acactacttt |
| 3781 | acagggattt atagtagcta aacagtctag cacttatgaa tatggatttt ggagtcagcc |
| 3841 | tggtagctaa agtgcccttg catgtaaact ctctgagcct cagcttccat gtctacacaa |
| 3901 | cagggatacc atatccccta ccccataggg ttgctgagag gagctgagat aaagcaaata |
| 3961 | aagtgcttgg aacagcttct gatacatggc aaatgtccaa taaatggtgc ccactatgaa |

[0116] An amino acid sequence for the protein (Spindlin-1) encoded by the SPIN1 gene that is a regulator of T cell exhaustion/dysfunction resistance is available from the UniPROT database at 55 accession no. Q9Y657 or accession number NP_006708. cDNA NM_006717 with gene location at Chr 9: 88.39-88.48 Mb.

| (SEQ ID NO: 105) | |
|---|---|
| MKTPFGKTPGQRSRADAGHAGVSANMMKKRTSHKKHRSSVGPSK | |
| PVSQPRRNIVGCRIQHGWKEGNGPVTQWKGTVLDQVPVNPSLYLIKYDGFDCVYGLEL | |
| NKDERVSALEVLPDRVATSRISDAHLADTMIGKAVEHMFETEDGSKDEWRGMVLARAP | |
| VMNTWFYITYEKDPVLYMYQLLDDYKEGDLRIMPDSNDSPPAEREPGEVVDSLVGKQV | |
| EYAKEDGSKRTGMVIHQVEAKPSVYFIKFDDDFHIYVYDLVKTS | |
| (SEQ ID NO: 106) | |
| 1 | gaggcgccgt ctggctcagg ctggggccgg cgggagcgcg aacgagcgac ggcggaaccc |
| 61 | gtgggcctgt ggactgcagc ctcggcggtc agcagagtgc ttgtgatttc acgtattttt |
| 121 | gctgaactcg taaaagagac acttggatgg tggattaacc agaacactaa cattctgtga |
| 181 | aaagtttcaa attggagaat attgaatttt caccctagtc cagcagctcc gctgctcact |
| 241 | taaatacaga tgaatgaaga ccccattcgg aaagacacct ggccagcggt ccagagctga |
| 301 | tgcaggccat gctggagtat ctgccaacat gatgaagaag aggacatccc acaaaaaaca |
| 361 | tcggagcagt gtgggtccga gcaaacctgt ttcccagccc cggcggaaca tcgtaggctg |
| 421 | caggattcag catgggtgga aagaggggaa tggccctgtt acccagtgga aaggaaccgt |
| 481 | tctggaccag gtgcctgtaa atccttcttt gtatcttata aaatacgatg gatttgactg |
| 541 | tgtttatgga ctagaactta ataaagatga aagagtttct gcgcttgaag tcctccctga |
| 601 | tagagttgcg acatctcgaa tcagcgatgc acacttggca gacacaatga ttggcaaagc |
| 661 | agtggaacat atgtttgaga cagaggatgg ttctaaagat gagtggaggg gaatggtctt |
| 721 | agcacgtgca cctgtcatga acacatggtt ttacattacc tatgagaaag accctgtctt |
| 781 | gtacatgtac caactcttag atgattacaa agaaggcgac cttcgcatta tgcctgattc |
| 841 | caatgattca cctccagcag aaagggaacc aggagaagtt gtggacagcc tggtaggcaa |
| 901 | acaagtggaa tatgccaaag aagatggctc gaaaaggact ggcatggtca ttcatcaagt |
| 961 | agaagccaag ccctccgtct atttcatcaa gtttgatgat gatttccata tttatgtcta |
| 1021 | cgatttggtg aaaacatcct agatgtcatc acaaactctg ccaaatttgt ggaactatga |
| 1081 | aatgtattat ttgtagacat aaagacttga ttgccttcca gtttaatgaa agcttaaatg |
| 1141 | tccctgcgaa cccacaatct ctgccagcag aactggtttt gttctgaata gtacagattg |
| 1201 | atgtgaacac aaagcatttt gtgtaaggag aacccctttc ttttaaaaga agtctgtcta |
| 1261 | tttcgagggg agttacaggc aagtttggta aaagttaagc tagtatcata gtcatttaaa |
| 1321 | attgtaatag atcttaacca ttttccccct caccctaact ctcttattct gccgccacaa |
| 1381 | tgcaagcata gtttgatgtt ttcgttattg ccttttttga gatgtatgta tctgtatcta |
| 1441 | cctatatcta tatgtgtgta tacatatata atatatacac acagatacaa gtgtacacac |
| 1501 | acacaccaca caccacacac accccactgg cagtctttgt ggattaggat gggggtgaca |
| 1561 | taattttctt gagtttaaca ggagtgcttt acccaagtca gtcatggata tgatatcact |
| 1621 | gctctttatt taaaagtaaa ctttgggcac aggaaccata tgggaacatt cagcttgttt |
| 1681 | aaaaaaaaaa aatcagaagt tcagagcacc ttttcaatct ggagccctta aaccataagt |
| 1741 | ccaaatatga attatttgtg aacagttaat gacccatatt agaattttac aatctggtga |
| 1801 | acaatctggg taaaaggcta cctttaattc taagcttcat ttttttttgg gggggggtta |
| 1861 | cattttaatc ataaattctt ttttgcaaag cccaggttct tcttccacac agtgtaatgt |
| 1921 | aggtgtattt tggacagcac atatggtcca ttgtgtacaa gtcagtaatc tggatttcag |
| 1981 | tacatggatt taaaaggcaa caatccatca ctggcttgtg tgtttttggt taagtttctg |
| 2041 | gaagaataca atgcttttat attggaagta taagttttga gtggcattgt tgccttctaa |
| 2101 | caagctctct gggactttta aagttttatt actattattg ctaatgtatg attatggtca |
| 2161 | gagactttca acccacccct tcctgcctac ccctggcttt tcctcacaaa gaatgtctag |
| 2221 | acaaacagca gcttagtctc ctgacacctc ttgtggggtg catgttcctg ctccaggtat |
| 2281 | gctgttcatg tcgattcatt ccattcagtg gccccttggg gtttgcatgc cagtgaagcg |
| 2341 | ttaccataga agagccagcc gtttgtgttc gcttggtagg tgtaagtaat agcagccctt |
| 2401 | agccacggag tctttatgtg gtttattcct gcaaggttgt tttaaactga aatagaactg |
| 2461 | ctagtgtgat tggttgatca gcaaaacagc tgctctcatt ttgttttgga ggaaccctgg |
| 2521 | tggtttgaca gccaggagaa aggccatatg tgaaaccagt ctcttgtgga gattggaaat |
| 2581 | cctccctgat atttgggcag agcctaaacg tgcatgcttg tcactcaaac accagaagtt |
| 2641 | tgaatcagag gtctgagtga cctcttttgt ggctgttctt gatggtttcc aggcctcgtt |
| 2701 | atgcatggtt tgcttgatgc ccattttttg tgccttgtgc tgttggatgg taacgaccac |
| 2761 | tcaccatgta aacacagtac ctcagttttc tgtccacagc tgcagtcgct ctgtccctcg |
| 2821 | tgcttcactg tgggcagcca gggacaagct tctgaaagca gtgtgatacc caagtcatag |
| 2881 | gtgcttctcg tatgtgaaca ggtgtcattc tacagatctg ttatgtgttt tcctgttgac |
| 2941 | tcttaagagt ccctgcatgt aaatctcaaa gctgagcctg gctcccagag tccagactga |
| 3001 | cattacagcg caagagtttg caagtgtgtc cagcatgcac caactgtgca gaacttggct |
| 3061 | cggtaacttt gcgtggaaaa ataaagtaca ttttgaagta tcttgagggt tgggtcaatt |
| 3121 | gagacatttc tagcattact taatgacttg cattgtggtt tttctgcaag caactttaat |
| 3181 | gacttttttt ataccacatg gtctcccagt ttctagatga atgcaacatg atgatggtga |
| 3241 | tgatgacgat gagtttaatc attgttcatt tattgccttt agggctgagg gaaagggaag |
| 3301 | gtttgttttt ttttctcccc attttccccc attctgtctt tcttttggtg acttacacca |
| 3361 | catgtaatga cgctatgact aattctgctc ccaagccctt gtatcttggg cttcatttta |
| 3421 | ggctcatgtg tcagatctgc atgcattgct tgcatttttc tggtatctga atgttggttc |
| 3481 | cttgttccag gaattcaaca ttaatttcca aaagtatcat gggacttgtg acaatacaag |
| 3541 | acatgaatct atgtataaaa tttatcggcc tttctcattt acctgctcta gtattattgt |
| 3601 | attgtgtgtg cgtgcgtgtg tgatgtcagg ctgccacgta aaacttcaga gaaaaatctt |
| 3661 | aaaagcagac catccttttt tgcatgctct attctaagta gaatgttcaa tgtaactgac |
| 3721 | taaaattgca tgttaaagat atttaggttt ttttgttttc tttattttta tttgttttca |
| 3781 | gtttcctgta tatttgctta ctgtgccgtt ttagtggttt taggataaaa atgcactggt |
| 3841 | gaagcaaatg tagtgccaac agaaggtgat tttccagttg taaatgtcat gcagcatttg |
| 3901 | aagggactgt gttttcttaa aaaaaaatca cagttacttc taaaccagat ttcatttctt |
| 3961 | ttattgtttt atgtgccaaa ccacgaagtg cattgggctt caatctctga acactgtaga |
| 4021 | cccattagaa gactgttccg attgttacaa attgtagtgc ctgaaaacac tcttaagctg |
| 4081 | attgtcttaa caaaatgaaa gttctccaaa gacaaaacag aacaattatt ataacaaaat |
| 4141 | aattatggtt gaaatgtctg tggttccttg gaaatgctgc gctctttgtg tttttccatc |
| 4201 | attagtgcag ttggaatgaa tgtgtatagg tcagaggtct tcgtgttcac attttaaaat |
| 4261 | taggtaaatg acctcatctt tcaagcttga attcattttt aattttaatt ttattttata |
| 4321 | caatgtgtag acagttccct gttctctgca tttagaagta tacacaatat aaatctgtta |
| 4381 | attctgtaag taatttttat aattatgatg taactctatc ttatccttaa aacatttaaa |
| 4441 | ataaaccctt tatgtgcaa |

[0117] An amino acid sequence for the protein (Ubiquitin-conjugating enzyme E2 E1) encoded by the UBE2E1 gene that is a regulator of T cell exhaustion/dysfunction resistance is available from the UniPROT database at accession no. P51965 or accession number NP 00118940, NP 003332, NP_872607 or NP_003332.1, cDNA NM_001202476, NM_003341 or NM_182666 with gene location at Chr 3: 23.81-23.89 Mb.

| (SEQ ID NO: 107) | |
|---|---|
| MSDDDSRASTSSSSSSSSNQQTEKETNTPKKKESKVSMSKNSKL | |
| LSTSAKRIQKELADITLDPPPNCSAGPKGDNIYEWRSTILGPPGSVYEGGVFFLDITF | |
| TPEYPFKPPKVTFRTRIYHCNINSQGVICLDILKDNWSPALTISKVLLSICSLLTDCN | |
| PADPLVGSIATQYMTNRAEHDRMARQWTKRYAT | |
| (SEQ ID NO: 108) | |
| 1 | attgcctgtt taatagttgc tgttgctgca cttccgcttc tctcccagcg agagagagac |
| 61 | acgagtggcc aggcccagcc gcagccgcag cagcagccgc cgcggcggca cggaggagcc |
| 121 | agacacaaag agaggggctg tttgcggggt ggggtggggg gttcgctatg tcggatgacg |
| 181 | attcgagggc cagcaccagc tcctcctcat cttcgtcttc caaccagcaa accgagaaag |
| 241 | aaacaaacac ccccaagaag aaggagagta aagtcagcat gagcaaaaac tccaaactcc |
| 301 | tctccaccag cgccaagaga attcagaagg agctggcgga catcacttta gaccctccac |
| 361 | ctaattgcag tgctggtccc aaaggcgata acatctatga atggagatca accattctag |
| 421 | ggcctccagg atccgtgtat gagggtggtg tattctttct cgatatcact tttacaccag |
| 481 | aatatccctt caagcctcca aaggttacat ttcggacaag aatctatcat tgtaatatta |
| 541 | acagtcaagg tgttatttgc ttggacatat tgaaagataa ttggagtcca gcactaacca |
| 601 | tttctaaagt cctcctttct atctgctcac ttcttacaga ctgtaatcct gccgacccct |
| 661 | tggtgggaag tattgccact cagtatatga ccaacagagc agaacatgac agaatggcca |
| 721 | gacagtggac caagagatac gctacataaa ttggggtttc acaattctta cattatttgt |
| 781 | ctgtcacaga agagagctgc ttatgatttt gaaggggtca gggagggtgg gagttggtaa |
| 841 | agagtagggt atttctataa cagatattat tcagtcttat ttcctaagat tttgttgtaa |
| 901 | cttaaggtat cttgctacag tagacagaat tggtaatagc aacttttaaa attgtcatta |
| 961 | gttctgcaat attagctgaa atgtagtaca gaaaagaatg tacatttaga catttgggtt |
| 1021 | cagttgcttg tagtctgtaa atttaaaaca gcttaatttg gtacaggtta cacatatggc |
| 1081 | catttatgta aagtccctct aagactacat actttttgtt taaaacaaaa ttggaatttg |
| 1141 | ttttcccttc ttggaaggga acattgatat ttaacagagt ttttagagat tgtcatctca |
| 1201 | tatatataaa atggacacgt ggctataaaa caccatataa gagatgagta gtgcgtttta |
| 1261 | ttttatatgc caatctactt tctttaaaaa aggtctgaat caggacttgt gaaaacctgt |
| 1321 | agtgaaatac cttaagctgt taactaactg taaggcgtgg aataggagtt gctcagtgga |
| 1381 | ttggttctat gttgtggact acttaagtct gcatttgtta ctgtgctaat aaacaatatt |
| 1441 | aaaaaccacc taataaacac tgctgtgttc atttactttt cttttgcctt ttggttgcca |
| 1501 | ttcgcagatt cttctgaaat cgataggtat ctgcttctaa aacaagctaa aaataatgca |
| 1561 | tatttagtag gtattagtta gttacctata ttaggatctg tactttacac agctgtagat |
| 1621 | gaggtatcct agaaaaggtt aaataatcta ccccatttag gcttcaaaga cgaaccctac |
| 1681 | tgcatctttt taaaagcatt ttctgacttg cagadgctgt agtagcaagt acatgagaaa |
| 1741 | tgggttccgt catggataaa ttggtaccct gccttagggg gca |

[0118] An amino acid sequence for the protein encoded by the ARHGAP5 gene that is a regulator of T cell exhaustion/dysfunction resistance is available from the UniPROT database at accession no. Q13017, cDNA NM_001030055, with gene location at Chr 14: 32076114-32159728.

(SEQ ID NO: 116)
GAGGAAGAGAGGCGAGCGGAGAGTGGAGGAGGAGGCGGCGGCGGCGGGAGCGGTCCCCAGGAATGTCGCTGCC
GCCGCCACCGCCGGGGCCGCTGCCGTTGAGGAGGAGACGGAGGAGACCGACGTTGTTAGGAAGATGATCCCTA
TGATCTTGAAGATGTTTCTGCACAGAAATGAGGGAAATACAAAGAACCAAATACAGTTCTGAAATTTGGGATC
TGTATTTTGAGATGATTTTATTTTCAGAATGAGAAGCATATCTGGTTACCTTTATGAATGTAGAGACATGAGA
AGAGAGTTATGATGGCAAAAAACAAAGAGCCTCGTCCCCCATCCTATACCATCAGTATAGTTGGACTCTCTGG
GACTGAAAAAGACAAAGGTAACTGTGGAGTTGGAAAGTCTTGTTTGTGCAATAGATTTGTACGCTCAAAAGCA
GATGAATATTATCCAGAGCATACTTCTGTGCTTAGCACCATTGACTTTGGAGGACGAGTAGTAAACAATGATC
ACTTTTTGTACTGGGGTGACATAATACAAAATAGTGAAGATGGAGTAGAATGCAAAATTCATGTCATTGAACA
AACAGAGTTCATTGATGACCAGACTTTCTTGCCTCATCGGAGTACGAATTTGCAACCATATATAAAACGTGCA
GCTGCATCTAAATTGCAGTCAGCAGAAAAACTAATGTACATTTGCACTGATCAGCTAGGCTTAGAACAAGACT
TTGAACAGAAGCAAATGCCTGAAGGGAAGCTCAACGTAGATGGATTTTTATTATGCATTGATGTAAGTCAAGG
ATGCAATAGGAAGTTTGATGATCAACTTAAATTTGTGAATAACCTTTTTGTCCAGTTATCAAAATCAAAAAAA
CCTGTAATAATAGCAGCAACTAAATGTGATGAATGCGTGGATCATTATCTTAGAGAAGTTCAGGCATTTGCTT
CAAATAAAAAGAACCTTCTTGTAGTGGAAACATCAGCACGATTTAATGTCAACATTGAAACATGTTTTACTGC
ACTGGTACAAATGTTGGATAAAACTCGTAGCAAGCCTAAAATTATTCCCTATTTGGATGCTTATAAAACACAG
AGACAACTTGTTGTCACAGCAACAGATAAGTTTGAAAAACTTGTGCAGACTGTGAGAGATTATCATGCAACTT
GGAAAACTGTTAGTAATAAATTAAAAAATCATCCTGATTATGAAGAATACATCAACTTAGAGGGAACAAGAAA
GGCCAGAAATACATTCTCAAAACATATAGAACAACTTAAACAGGAACATATAAGAAAAAGGAGAGAAGAGTAT
ATAAATACTTTACCAAGAGCTTTTAACACTCTTTTGCCAAATCTAGAAGAGATTGAACATTTGAATTGGTCAG
AAGCTTTGAAGTTAATGGAAAAGAGAGCAGATTTCCAGTTATGTTTTGTGGTGCTAGAAAAAACTCCTTGGGA
TGAAACTGACCATATAGACAAAATTAATGATAGGCGGATTCCATTTGACCTCCTGAGCACTTTAGAAGCTGAA
AAAGTCTATCAGAACCATGTACAGCATCTGATATCCGAGAAGAGGAGGGTGGAAATGAAGGAAAAATTCAAAA
AGACTTTGGAAAAAATTCAATTCATTTCACCAGGGCAGCCATGGGAGGAAGTTATGTGCTTTGTTATGGAGGA
TGAAGCCTACAAATATATCACTGAGGCTGATAGCAAAGAGGTATATGGTAGGCATCAGCGAGAAATAGTTGAA
AAAGCCAAAGAAGAGTTTCAAGAAATGCTTTTTGAGCATTCTGAACTTTTTTATGATTTAGATCTTAATGCAA
CACCTAGTTCAGATAAAATGAGTGAAATTCATACAGTTCTGAGTGAAGAACCTAGATATAAAGCTTTACAGAA
ACTTGCACCTGATAGGGAATCCCTTCTACTTAAGCATATAGGATTTGTTTATCATCCCACTAAAGAAACATGT
CTTAGTGGCCAAAATTGTACAGACATTAAAGTGGAGCAGTTACTTGCTAGTAGTCTTTTACAGTTGGATCATG
GCCGCTTAAGATTATATCACGATAGTACCAATATAGATAAAGTTAACCTTTTTATTTTAGGGAAGGATGGCCT
TGCCCAAGAACTAGCAAATGAGATAAGGACACAATCCACTGATGATGAGTATGCCTTAGATGGAAAAATTTAT
GAACTTGATCTTCGGCCGGTTGATGCCAAATCGCCTTACTTTTTGAGTCAGTTATGGACTGCCGCCTTTAAAC
CACATGGGTGCTTCTGTGTATTTAATTCCATTGAGTCATTGAGTTTTATTGGGGAATTTATTGGGAAAATAAG
AACTGAAGCTTCTCAGATCAGAAAAGATAAATACATGGCTAATCTTCCATTTACATTAATTCTGGCTAATCAG
AGAGATTCCATTAGTAAGAATCTACCAATTCTCAGGCACCAAGGGCAGCAGTTGGCAAACAAGTTGCAATGTC
CTTTTGTAGATGTACCTGCTGGTACATATCCTCGTAAATTTAATGAAACCCAAATAAAGCAAGCTCTCAGAGG
AGTATTGGAATCAGTTAAACACAATTTGGATGTGGTGAGCCCAATTCCTGCCAATAAGGACTTATCAGAAGCT
GACTTGAGAATTGTCATGTGCGCCATGTGTGGAGATCCATTTAGTGTGGATCTTATTCTTTCACCCTTCCTTG
ATTCTCATTCTTGCAGTGCTGCTCAAGCTGGACAGAATAATTCCCTAATGCTTGATAAAATCATTGGTGAAAA
AAGGAGGCGAATACAGATCACAATATTATCATACCACTCTTCAATTGGAGTAAGAAAAGATGAACTAGTTCAT
GGGTATATATTAGTTTACTCTGCAAAACGGAAAGCTTCGATGGGAATGCTTCGAGCATTTCTATCAGAAGTTC
AAGACACCATTCCTGTACAGCTGGTGGCAGTTACTGACAGCCAAGCAGATTTTTTTGAAAATGAGGCTATCAA
AGAGTTAATGACTGAAGGAGAACACATTGCAACTGAGATCACTGCTAAATTTACAGCACTGTATTCTTTATCT
CAGTATCATCGGCAAACTGAGGTCTTTACTCTGTTTTTTAGTGATGTTCTAGAGAAAAAAAATATGATAGAAA
ATTCTTATTTGTCTGATAATACAAGGGAATCAACCCATCAAAGTGAAGATGTTTTTCTACCATCTCCCAGAGA
CTGTTTTCCCTATAATAACTACCCTGATTCAGATGATGACACAGAAGCACCACCTCCTTATAGTCCAATTGGG
GATGATGTACAGTTGCTTCCAACACCTAGTGACCGTTCCAGATATAGATTAGATTTGGAAGGAAATGAGTATC
CTATTCATAGTACCCCAAACTGTCATGACCATGAACGCAACCATAAAGTGCCTCCACCTATTAAACCTAAACC
AGTTGTACCTAAGACAAATGTGAAAAAACTCGATCCAAACCTTTTAAAAACAATTGAAGCTGGTATTGGTAAA
AATCCAAGAAAGCAGACTTCCCGGGTGCCTTTGGCACATCCTGAAGATATGGATCCTTCAGATAACTATGCGG
AACCCATTGATACAATTTTCAAACAGAAGGGCTATTCTGATGAGATTTATGTTGTCCCAGATGATAGTCAAAA
TCGTATTAAAATTCGAAACTCATTTGTAAATAACACCCAAGGAGATGAAGAAAATGGGTTTTCTGATAGAACC
TCAAAAAGTCATGGGGAACGGAGGCCTTCAAAATACAAATATAAATCTAAAACCTTGTTTAGTAAAGCCAAGT
CATACTATAGAAGAACACATTCAGATGCCAGTGATGATGAGGCTTTCACCACTTCTAAAACAAAAAGAAAAGG
AAGACATCGTGGAAGTGAAGAAGATCCACTTCTTTCTCCTGTTGAAACTTGGAAAGGTGGTATTGATAATCCT
GCAATCACTTCTGACCAGGAGTTAGATGATAAGAAGATGAAGAAGAAAACCCACAAAGTGAAAGAAGATAAAA
AGCAGAAAAAGAAAACTAAGAACTTCAATCCACCAACACGTAGAAATTGGGAAAGTAATTACTTTGGGATGCC
CCTCCAGGATCTGGTTACAGCTGAGAAGCCCATACCACTATTTGTTGAGAAATGTGTGGAATTTATTGAAGAT
ACAGGGTTATGTACCGAAGGACTCTACCGTGTCAGCGGGAATAAAACTGACCAAGACAATATTCAAAAGCAGT
TTGATCAAGATCATAATATCAATCTAGTGTCAATGGAAGTAACAGTAAATGCTGTAGCTGGAGCCCTTAAAGC
TTTCTTTGCAGATCTGCCAGATCCTTTAATTCCATATTCTCTTCATCCAGAACTATTGGAAGCAGCAAAAATC
CCGGATAAAACAGAACGTCTTCATGCCTTGAAAGAAATTGTTAAGAAATTTCATCCTGTAAACTATGATGTAT
TCAGATACGTGATAACACATCTAAACAGGGTTAGTCAGCAACATAAAATCAACCTAATGACAGCAGACAACTT
ATCCATCTGTTTTTGGCCAACCTTGATGAGACCTGATTTTGAAAATCGAGAGTTTCTGTCTACTACTAAGATT
CATCAATCTGTTGTTGAAACATTCATTCAGCAGTGTCAGTTTTTCTTTTACAATGGAGAAATTGTAGAAACGA
CAAACATTGTGGCTCCTCCACCACCTTCAAACCCAGGACAGTTGGTGGAACCAATGGTGCCACTTCAGTTGCC
GCCACCATTGCAACCTCAGCTGATACAACCACAATTACAAACGGATCCTCTTGGTATTATATGAGTAGGAAGT
GATTGCAAACAGGCTGGATTTGGACAAAAAGCAAATCTAGACATGCATGTTTCAGGGTTCAGTAGTATACTTC
ATGTTTCATACAGATAATTCACATTCAAAATTACATTTTCTCTTTGAACTAGATGGTATTCCTTATTCACTTA
CATTACAAATCTAAGACCATGTGATAAGCATGACTGGAGAGGTTTAATTTTTATAAACAAAAATAGCTATAAA
GTACAAAGCTGCTGCTGCATGCAACCTTATTGCAATCAGTATATCATTCCTGTGGCAATTTCTGTCACCTTAT
ATTGTGAATAAAATTTTTCTATAGAAATTAAATGATTTAAAAACTCACCTATATGAAACATTTAATGCTTTTC
AGCCTGCTTTCTGGCTGATTTTGTTATTTGATGTGCTAATTTGGGCAACTTAATTTACATTCTGGCAGTCGGT
GTAGATAACTAAAAGCCCAGTTAAGTATTTTATAATTTCAGGCTACTGAGGCCATGCTTGGGATGTTGTTTGA
AAGAAAGAAAAAATACACTTGACATATTTCACATTTCTGTACCTTCATCTTTACTTCCAAGTAAACCCGTGGA
TGATTTGATGAGGGATAAATGAACCTATTTCTTTTACACACATACCAAGGACATGCTTGTGGCTAAAGTGAGT
TGATAATGTTGTGCAAAGGATAGTTGTCACCAACTCATTTCTTTATGGTCCATAATGAAATAAAAATTTTGTA
TACTGTTAATTCTGTAAACAGATGCATGTTCAAAAGATCTATGATGGTCTTGTAATCTTAATCTAATATATTT
TAGATATTTTAATTTTTTCCCTCTTGGGGAACACATTTAGTATAGTGTAGAAAATACTTCCATGACATTTTCA
TATAAGGTTATATAACTTTTCATACATAAACATGAAATTTGTTGTAGAAAATTCTTTAAACCAAACATTTAAA
TCTAGGACTTCAATTTAATTTGTTCCTTGAATCTATTTTTATGTGGCCCTTAAAAAATATCCAAAAAACCCAT
TGCTAATATAGCAATAAAAATACTTTGGGTACTGACAGACTCTTTGGAGTGTTTATATTACAAATTTGTATTC
ATATTCTTTTCTGTGATGTGTTGTACTAAAATCCAAAATGGCTTTTGCACCATTTTTAAGCCAATTTTTTCCT
TTGATGTTGGTACCAGAATTACTATAAGTGACTGCTGCTTTTGGGGGTAAACATTTTGTTAGTGAAGATAAAA
CCAGAACACTAAATTATGGATAAAATTTTCAGAATAGGTGGCACAGGTAAATTTCACTAGGTTATATTTTGTG
TAGTAAAGAAAAAAATTATTTGGTCAATGTTATCTTAATTCATACTACAATTTAAGATTATCTTATGTGTATT
ATAGTAAATAGATGATTTTCAGATTCAAGGCTCCTAAGAGTTTGATTTGCTCTGTTTTTTCCTAAAATAAATA
TTGTCTCTCCCAACTGTTAAGTTCTAGGTATTGTACTTCCAATTTTAACTTCAGAACCAAGATGTTGGCATGA
ACCAGGCTGCTGTTGAAGTACATGTATATTATAAATTATCTTATTTGTGTTATACTCTTACATGTTATCTTTT
CTAAGAAAACAAAGTCCCTATTATTCCTATTGCAAAGCACACAGGAATTAAGAAAGTACAGTAATTTTTAAAA
AAAAATCCGGTAAATGTAGTATTCTTAACCTGTTCTATATTACTTATACCTATTGTCTATATAGCTTTAATTT
ATAGTTGTCAGTTTAACTATTGGCATGTCTGGCAAAGAAAATTAAACTTTAAGAGTTTTATAAACTGTTTCTA
GGTTGCTAAAGAATTTATTTTTCTACTATATATGGTATAGACAAAGCATCAAACTATGTACAGGAAAAAAGCC
TGACTATTTCTATTTGGAAGTAGGCTGAAAAGAGAATTTTCAAAACTGTTCGTGTCTTCAGTTCATTCTGTCA
TAACTTTGCTATTGTAATATGTGAATACCAGTTTATTTAAGCTGTTCTCTTTTATACTGTATTAATTTAATGT
TCATCTGCGTTTAGTACCATTTTTGTTATTAAAACTGGCATTTACCGTTTTTCACATTAACCCACCTTGCACC
TTCCCCCAAACTTATCTCCACTTTTCTATGCATTCTATCATTGATTTGACACACTTCATAGTGAGTCATTTAA
ATACTCTACGTTTGGTTCAATTAACCAGTAGGTTACAGTTATTGAAAATTAAAGTACAGTTTAAAGCTCAGTC
TGTTACACTGAATTGATTGTGTTTGTTTTTGCCAAGGGTTTAGATATGCTTTTAAATATTAGAAACATCTAAG
AACAGAATAACATAATTAAACTTTTTTCTGGTAAGTTACTGGAAGGTTTCACTGTTTAGGGACCTATCATATG
AGACTTCTTAAAGGATTAAAAGAATAGGATAGTCTCATAATTGTGAGTAAACATCAAGGCATTATATTTTACA
ATACTGAATAAAATTTCATCTACACACATGTTGCCATTGTTTCATTTAAGGTTCAGTGCTTATAGTTAACTAC
AATATTGGACCTAACAGGATCTAGATTAGCAATATAAAGAAGCATAGTGGTACTCTGTTTCACACTTTCAGTA
GATTTATTAGAAGTCAAATTCTATTCAACAGACACTTATTAGGATATACAACTAATTTAAGAATAAAATTCCA
GGCACAATATATTTTTTTTAAATGGTATTTGTTAGTAGTGCTTCTTCCCCTTAACATTTACAGTGTAAATACT
GCAGGTAACCGCAATCTAAGTTAGCCAAAAAGCAGCTTTTTTTCCCATACTGTATGTAAATAATGTAGACCTG
GGTTTTTTTGTTTATTTGGGTTTGTTTTTTTTTTTGAGGTACTGGAATCTAATTAATATCTCTTAGGTATCAA
CAAAAGGGAACAATTGGAATGAGAATTTAGGCCTTAGCTTCCATGGTGATTTTTAGTTTTTTATACAGTAATA
ATTGTGATGCTATTTGTCAACTGGATATAAATACACATATAATTTTAAAAAGTCAAAAGTGCTTTTGTTTCTT
TGTTTAATGTAATTTTTGTGCTTCACCTACAGGATGCTGCAGTAAATTAAATATCAGTGAAGCTTCTGATGTA
TAAAGAATGCTATGAATAAAACATTAAGAAGCTGTGTAATTTTAAGTTATAGTTGCCTCTATTTTTACCATTT
CATTGGTAAAAATTAGCTAATTTTTTTCAAGTGAAATGAAAAATAAAAATATAAATTTATCAATATGATGGAA
ATCTTATTAAGGAGATGTATTATTGAATTTTCACTGTACCTGAAAAGGAGATTCAAAATTTTTTCTGGGGATG
TATATAGGTGAAAATTTGATTTTTTAAATTATCAGGAAAACAAGATAATGCACAGATTTCTAAGACTAAGATC
TTACCTGGATGTGATTTTTGAGCTGTGGCTAGACATTCTTTAGAGCCACTGGAAATATTTTGAAAACTATTCT
AGTTATAGCAGAGCTGCTAATATTAACGAATATATTTGTGTCTTCATGGTTTGTGACTATTAGGCCAAATTTT
GTGGTATATGTTGTCAGTCTGGATCTGGTGAGGTCTGTTCAACATGAATCTTTGTGTTATCTTGAATTTAGTA
GTTTCAAGGTACTTAAATTCTTAACAGTTTCTAATTTGTTTCAATACATATGGGACATGGTTGATTTTTTTAC
TGTATTAGAACTCTTGGAAGTTCTTAGCCTTTTCAGGTTATGAAATACCTGAAAGTAAAATTTTCTAAGATTT
AATAAGGGAAGATACTATTCAAATCATTTTCTTAGGATAGCATCTTTACATACAATGAGAGGATTGTACAAGC
ATTAATCTCATATTCCAACATCCAGTTACTTGATGTGATCCAAGTACCCTGGTCTTTTTGAAGCAGTTAAAAT
CTAATTAATTAACTTTGGGAGTCTTCACTATTCAATTGATCCTCATCATTGTCCTATTTGCATGACTCCATTT
TTTCCTCCACTATATGAGTTTTCTTTGTCAGGGGGAGAGGAGTGGGAAGAGTCACAGAATCTCATATTCACAT
CTTAATTAAATTGTGTGAAATTAGTCTTTTGTGGAAATTCTGTAGGCAGTATGATTTTGAAAAGCTAACCAAT
GATAATTAGCATTTTAGTTAATACTAAATGCATAAAATTATAACCCTTGAAATTAATTTGGTGCTGGCAGTTC
TGGTTTAGTCATTTTTACCAGTAGTTAGTAGTATTAAGACCTGCAGTATATGCACTTTTTGAGTAGCTGTCAA
ATAATTGTAGTTGAGAAACAACTTGTTTATTCTCACAATTCAGATTTTCTATTCAGTTTTGTCTCAAATAGTA
AGTTATTGTGAACAATTTAATAACGGCCCTCCTGTTCTAGTTTGCCTAATATTTTAGTTAAGATTTAGTGTTT
TAACCTATTTTTTTAAGTTTATTTTTTGTATTAGATTTTATTTGAATAAGTTATGTGGGTTTAGTAATTGACC
TATTTATTCATTGCTTCACTAATTCATCCAGATTAGTTTTAAGTGTGTATATGTATTTGCTCACCAGATCATT
TTCTTGGGACCTTGAACTGTGAATGTTTTGTCCTAACCATTTAATATTTTCTAGGTACTTGCTGCAAGTTCTT
GAACTATTTTACCAGCTTTAACTTTGGGGCTCTTAGTTTCTTTTCTCCAGATTCTTGTTATTTTATTTTATCC
AAATAAATATTTAGGTGTTCTAAGA
(SEQ ID NO: 117)
MMAKNKEPRPPSYTISIVGLSGTEKDKGNCGVGKSCLCNRFVRSKADEYYPEHTSVLSTIDFGGRVVNNDHFL
YWGDIIQNSFDGVFCKIHVIFQTFFIDDQTFLPHRSTNLQPYIKRAAASKLQSAFKLMYICTDQLGLFQDFFQ
KQMPEGKLNVDGFLLCIDVSQGCNRKFDDQLKFVNNLFVQLSKSKKPVIIAATKCDECVDHYLREVQAFASNK
KNLLVVETSARFNVNIETCFTALVQMLDKTRSKPKIIPYLDAYKTQRQLVVTATDKFEKLVQTVRDYHATWKT
VSNKLKNHPDYEEYINLEGTRKARNTFSKHIEQLKQEHIRKRREEYINTLPRAFNTLLPNLEEIEHLNWSEAL
KLMEKRADFQLCFVVLEKTPWDETDHIDKINDRRIPFDLLSTLEAEKVYQNHVQHLISEKRRVEMKEKFKKTL
EKIQFISPGQPWEEVMCFVMEDEAYKYITEADSKEVYGRHQREIVEKAKEEFQEMLFEHSELFYDLDLNATPS
SDKMSEIHTVLSEEPRYKALQKLAPDRESLLLKHIGFVYHPTKETCLSGQNCTDIKVEQLLASSLLQLDHGRL
RLYHDSTNIDKVNLFILGKDGLAQELANEIRTQSTDDEYALDGKIYELDLRPVDAKSPYFLSQLWTAAFKPHG
CFCVFNSIESLSFIGEFIGKIRTEASQIRKDKYMANLPFTLILANQRDSISKNLPILRHQGQQLANKLQCPFV
DVPAGTYPRKFNETQIKQALRGVLESVKHNLDVVSPIPANKDLSEADLRIVMCAMCGDPFSVDLILSPFLDSH
SCSAAQAGQNNSLMLDKIIGEKRRRIQITILSYHSSIGVRKDELVHGYILVYSAKRKASMGMLRAFLSEVQDT
IPVQLVAVTDSQADFFENEAIKELMTEGEHIATEITAKFTALYSLSQYHRQTEVFTLFFSDVLEKKNMIENSY
LSDNTRESTHQSEDVFLPSPRDCFPYNNYPDSDDDTEAPPPYSPIGDDVQLLPTPSDRSRYRLDLEGNEYPIH
STPNCHDHERNHKVPPPIKPKPVVPKTNVKKLDPNLLKTIEAGIGKNPRKQTSRVPLAHPEDMDPSDNYAEPI
DTIFKQKGYSDEIYVVPDDSQNRIKIRNSFVNNTQGDEENGFSDRTSKSHGERRPSKYKYKSKTLFSKAKSYY
RRTHSDASDDEAFTTSKTKRKGRHRGSEEDPLLSPVETWKGGIDNPAITSDQELDDKKMKKKTHKVKEDKKQK
KKTKNFNPPTRRNWESNYFGMPLQDLVTAEKPIPLFVEKCVEFIEDTGLCTEGLYRVSGNKTDQDNIQKQFDQ
DHNINLVSMEVTVNAVAGALKAFFADLPDPLIPYSLHPELLEAAKIPDKTERLHALKEIVKKFHPVNYDVFRY
VITHLNRVSQQHKINLMTADNLSICFWPTLMRPDFENREFLSTTKIHQSVVETFIQQCQFFFYNGEIVETTNI
VAPPPPSNPGQLVEPMVPLQLPPPLQPQLIQPQLQTDPLGII

[0119] An amino acid sequence for the protein encoded by the ARIH1 gene that is a regulator of T cell exhaustion/dysfunction resistance is available from the UniPROT database at accession no. Q9Y4X5, cDNA NM_005744, with gene location at Chr 15: 72474330-72602987.

(SEQ ID NO: 118)
AGTAGCGATAGCAGCGGCCGTGGAGGTGGCGTTGGGGACTGTTTTCTCTCGGAGGCCGGAGCGGAGCCGCGTC
TGACTGAGGCGGGCAGCAAGCGGCCCCCTCGCTCCCTCCCTCCCTCCTCCGCGCCCTCCCCGCCGCCACCAGC
CGTCAAACGCCAACCGCCGCTCCTGGGGAGGAGCCGCGGCTCGCGGGGCCGGAGCCAGGCCTGCGTCCGGACA
TCAGCCGGAGCCGGAGCGAGAGCCGGGGCCTCGGCGTCCCCGCCCTCTCCCCGCCTCGGCCAGCGTCCGCCGG
GCCCCCGCGCGTCGCGCCATGGACTCGGACGAGGGCTACAACTACGAGTTCGACGAGGACGAGGAGTGCAGTG
AGGAGGACAGCGGCGCCGAGGAGGAGGAGGACGAAGACGACGACGAGCCGGACGATGATACCCTGGATCTGGG
CGAGGTGGAGCTGGTGGAGCCCGGGCTGGGCGTCGGCGGGGAGCGGGACGGACTGCTGTGCGGGGAGACGGGC
GGTGGCGGCGGCAGCGCTCTGGGGCCCGGCGGTGGCGGCGGCGGCGGCGGCGGCGGTGGTGGTGGCGGGCCGG
GGCATGAGCAGGAGGAGGATTACCGCTACGAGGTGCTCACGGCCGAGCAGATTCTACAACACATGGTGGAATG
TATCCGGGAGGTCAACGAGGTCATCCAGAATCCAGCAACTATCACAAGAATACTCCTTAGCCACTTCAATTGG
GATAAAGAGAAGCTAATGGAAAGGTACTTTGATGGAAACCTGGAGAAGCTCTTTGCTGAGTGTCATGTAATTA
ATCCAAGTAAAAAGTCTCGAACACGCCAGATGAATACAAGGTCATCAGCACAGGATATGCCTTGTCAGATCTG
CTACTTGAACTACCCTAACTCGTATTTCACTGGCCTTGAATGTGGACATAAGTTTTGTATGCAGTGCTGGAGT
GAATATTTAACTACCAAAATAATGGAAGAAGGCATGGGTCAGACTATTTCGTGTCCTGCTCATGGTTGTGATA
TCTTAGTGGATGACAACACAGTTATGCGCCTGATCACAGATTCAAAAGTTAAATTAAAGTATCAGCATTTAAT
AACAAATAGCTTTGTAGAGTGCAATCGACTGTTAAAGTGGTGTCCTGCCCCAGATTGCCACCATGTTGTTAAA
GTCCAATATCCTGATGCTAAACCTGTTCGCTGCAAATGTGGGCGCCAATTTTGCTTTAACTGTGGAGAAAATT
GGCATGATCCTGTTAAATGTAAGTGGTTAAAGAAATGGATTAAAAAGTGTGATGATGACAGTGAAACCTCCAA
TTGGATTGCAGCCAACACAAAGGAATGTCCCAAATGCCATGTCACAATTGAGAAGGATGGTGGTTGTAATCAC
ATGGTCTGTCGTAACCAGAATTGTAAAGCAGAGTTTTGCTGGGTGTGTCTTGGCCCATGGGAACCACATGGAT
CTGCCTGGTACAACTGTAACCGCTATAATGAGGATGATGCAAAGGCAGCAAGAGATGCACAGGAGCGATCTAG
GGCAGCCCTGCAGAGGTACCTGTTCTACTGTAATCGCTATATGAACCACATGCAGAGCCTGCGCTTTGAGCAC
AAACTATATGCTCAGGTGAAACAGAAAATGGAGGAGATGCAGCAGCACAACATGTCCTGGATTGAGGTGCAGT
TCCTGAAGAAGGCAGTTGATGTCCTCTGCCAGTGTCGTGCCACACTCATGTACACTTATGTCTTCGCTTTCTA
CCTCAAAAAGAATAACCAGTCCATTATCTTTGAGAATAACCAAGCAGATCTAGAGAATGCCACAGAGGTGCTC
TCGGGCTACCTTGAACGAGATATTTCCCAAGATTCTCTGCAGGATATAAAGCAGAAAGTACAAGACAAGTACA
GATACTGTGAGAGTCGACGAAGGGTTTTGTTACAGCATGTGCATGAAGGCTATGAAAAAGATCTGTGGGAGTA
CATTGAGGACTGAGAATGGCCCTGCATAAAATGAACTCTGAAAACTTTACCATCTAGAGTGCTCATGCAATTA
AAACAAAACAAACACAAACAAGGAGGCACTAAGCCTATTCTGACACCACTGGTCTGTAGTACCAGAATTGTTT
TGTTAATGGAAAGTTTAAGTAAATTATATTGTAATAAAAAGGTAGATAAACCATTGTACAACAGTATTCTAGG
CCACCAACAAAAGTGTGACAGACACACTAAAAGCCCTCCAACTTTAACTTGTAACGTAGCTTCATTCTCAAAG
CTGACTCCTTTTTTTTCTTTTTCCTTTTCCTGAGTGTAGTACAGTTAAAATTTCAAACAGCTCCTTGACACTG
CTTTTCATGTTCAAACCAGCCATTTTGTTGTACTTTGGTAAAGGACCTCTTCCCCTTCCTCCCCTACACATAC
AGATACACCCACACACAGACTGACTCTCTTTCTCTCATACCCCAAGGTCATGAGTGAATGATGCTTAGTTCCT
TGTAAAGAAAATCTTGGGATGGGGAAAGGGGTAGGCAGCAAGAGGATTCAACAAACGAAAAACATAAAAACTT
TGTATATGACTTTTAAAACAAGAGGACAACACAGTATTTTTCAAAATTGTATATAGCGCATATGCATGGACAA
AGCAAGCGTGGCACGTGTTTGCATAATGTTTAATTACAAAAAAATATTTATTCTTTAAAAATCTTCAAGATTA
TGTCTATTTGCTGTGCATTTTCTTTCAGTTTGCTTATCTTTCCCGGGTTGGGGTTGGGATAAAGGTGTGTCGG
TTTAGCACCTCTGGAAGACCTATCTAGAGCTCTTTCACTTTCCTGAGGTTATTTTGCCCTTTCTGGTGTTGGT
ATGTCTGTTGCCGGCCATGGGCCTCATGCCTTGAATTCCTGCTCTTGATCAGGGACAAGGGAGGTCAAGCTCT
GACTAATGCCATGACCTGATTAAGGGGTACAGCAGGGAGTTTTGTTGCTACAGCTCATGAATTAACCTGTCCC
AACCTAATCCCCCTCCATGGCATCATGCCTCTACCCAAGCCTTTGTGTGCCCATGTTATGCACACAGCTGTAG
GCATTCTTAAGTCCCCTGTCGCATCCAGTGGAAGCATTTTAAAATTTCTTTTACTTTTTGGTTTTCCCTTAAT
TGCTGCTTTTCAGATTTTAGTTATGGCTCGTCTGCTCACCCCTTCTCTACATTAGGGTGTCAAAGAGAATGTT
TTGCTTTAAATATAAATAGCCATTCATTTAGTCTCAGATTGTGAATTTAAAATGGTGGATACCGAAATTGCTT
GTGTGTGTTGCTGTGGGTTTGGTTTGAAGGCAAACACCCCTAGAACATGATATTCCCATCTAGTGCATTTAAA
TAGAAATCACTGAGTTTGCTGCTTTTTTATTGTCAGCAGATAGGAGAATTAATAATGCATTTTAGCTGTGATG
TCCATTTTTATGAAATTCCTACTAAGAGCTATGTTAAAAGTAAAGGATGGTGGTGGTTGTATTAACTATATAC
CTGTTTAGGCCATTCTGGCTGTGGTATTTTTCAATAGGTCAGCATCTGTAAATCTGTCAGTTTTATACAGGAG
TGCAGAGTGAACTAGGCAACTAGATTAAGAGGTCTAAATATGAAATACCAGTTGAGGCTGAGGACCTCTTCGT
CTTCCTTTAAATGTCTTTTGCCTAGGGAGTGTTTACCATTTGTGAGGCAGCTTTGTCTGCTCTTACACTGTAC
ATCCTATTACTCCATTGGGAAGTAGGTTCACTTTCCTCTGGCCTTTTGCCTAAGTTAGGCTTTGCTGAATCAA
CCCTACTTTTCCTTTTAGAAAAGGTTGTTACAGGAGATTTACTGGCAACTGTTCTTTTCCCATCAAAAATCAG
TGAATGTTTGCTGAGTATAAATGCTGCTTCCTTAAACCACTTGTCGCTTTAGGATCAACTTTACCTGTACCTT
TTCTCCTTTCCTCCCTTGCCACCTCAGGTGCAAATCTGAACTCAGTGTCTGCTTCTTCCATTTTCTCGTCTCT
CTCCCCTCTTCCCCCATTATCCATATGACATTATTTTACTTCAAATGACAGCATCAATCTTAAAAAGATATAC
ATTAAAACTAAGGAGTTTTTTTAAAGAAAGCCTGAATAAGTTCCTTTCCCTGGTAACTTTGAAAAGCAGTCAG
AGTTGCTATATAGATATATGTGGCTCCTTTAAAATGCTTTGTGTATGTGTGGTGTTTAAAAAAAAAAAATCTT
ACCAGTTAACTTTGCAGTGTCTAGGTTTGAGTGTCATAAATCCACGTGTTCCTGTTGCAACAAATACCCAAAA
ATTGTGTGTGCACTTCCTAATACCAGTCTTCACCCATGGAGGAACAGTGCTTTTTAGAGATGCTTTCTATTTC
AATGTTGGCATACTGCCTGAGGGTATTGCAGTTGTGGGTGCATTCCCTAATTTGTATGATCAAGATGAACTGG
CCCTTTTCTACTTCCAAGCTTTTAACAGATACCACCATATTTGACAGAATTCCCAGAGTGAATTGCTTGTGTT
ATTAGTAGATTCAGTGCCCCCAGCTGGGATAGGCAAGCCATGACAGCTTCCCTGTTTCACCTACAGAAGTCTT
ATCTGAGGGATCTATTCACAGTAAGCACCAAGGTCTCCATGTCTTGAGGTCAGTTTCATTGTCTTTTGAAAAG
TGCATGCTTCATTTGAACAATTCATTCAGCAGCAGATGGACTTTCAGTGATTTAAAATAAAATTTTGATCCAA
AGCTCAGGACACAAACCACAGTGGTAAAATTGAGTAGCATATAATATCAGACTAAATTATCTGTAATTTTCCA
CAACCCAGATTGTATGTGTTTTATGTGTGTTTAAATAAATATGTTAGATACACGTGTATACATACACCCATAT
ACAACAGATCCAAGACTGGCTGACTTCATTTGAAATGGTTGAATCTGCTGTGTAATAAAGTGGTTCAACCATG
ATTAGGAACTGAAATTTAGTAGAAGAGGGAAAAGGAGTTAATGTAACAAATTATTTTAGCTACAAACCCCGGT
AATAGAGCACTTGGGGGATGGGATGGGGTGGGTTGGTGAGACAATCAGAATGGTAAATTGATTAAATGCTCCT
AACCCTGTAATTTTGTGCATAGAGCACCCTATGCTGTGGAAATAACTGTTCTTAGATTTCATTGTAACTGGAC
TGTTCAGGTTGCCCAGAGGGAAAGAACATTCCTAATTCTAATAAAATAAACTTTTATTTTGTTATTCCATTAG
TTACTTATGTTTATTTTTATAGTTAAAAAATGACTAAAGGTGGCTAATAGCCACCCGTATTATGTGCCTTATT
CACTGTTCCCACTTAATATAAAATGTCAAAAATTGGTTGTTTCTTTGCAGGGAACTGTGAATGAGCCCATTCC
CCCAACATTTAACTTGGTTAATGAAGCTTTCAGAGCATTTTCTGAAAGATTTCCAATTTCTGCATCTCAGATA
TTGAATTTAAATTGTTTGTGTTGTAACAGTGATACAAAAATGTTCAATAGCTCTTTGAATGCCACTTTTTTTA
AAGAAAATACTTTAAAAGTCATTCTTAGCTAACCTCAAAACTCCTTTACATTACTTTCATTTTAGCTCACTCT
TAAAGCTGATACTGTTATATAGGGATGAAGGGAGAGTTTTCTTAAAGAAGGTCCCAAAGTTGAAGATCGTTTG
TCATTGATACTCTGGCCAAGTCCAGGTTTTAGGACAATTTAATTTACTCTTATTTGGATCTGTAATTATGGGA
GTTTATCACTTTTCCTCTTCAAAGCACTTCAACTTACTGTCTAAAACAAGTGGAGAAGAAATTGCCATTTTTT
ATAAAGGAGGAAGATAAGGCTCACTGAGGTTAAATAACTCCCTCAATTTTTCATTTCCTTCTACCTGAAACTT
AACATCATGCTACCTCTTTGTATCATATTTTGTTATTCTGGTCACAGAATGACCTAGTATTCTGTACCAGGGA
AGGTAGTTCTTAACTATATTGTACTTTTAAACCACATTAAAGACTATTATAAATGCCTATCACTGCTACTGTT
AGAGGTTGCTCTATACTATCTCTGATCTTTCATTTGTTGCAGTTTGCAACACAGTAGTTGAGAATAAGTGGTT
TAGTATGATTTGCTTAATAGTACCCAAGTAATTTGCAGTTGTTGGTTTAGTTATTCAAATGAATTTCCATTGT
AAAGAATTTTGGATAGTCTGCAGGAAATTGTTACAGGATGCACAGAACATCCCATATCCATTGGATCTCAGCC
TTTGAGGCTTTAAAAAGATGATAAGCAGTGAGTTTTATGAGAAAATTTTGGCTCCTTCAGAAACAGGAAGATA
AGTGGGCCCCTCAGATTTTTCATATATCTTTGGGGATAAAGTTGGTTATATCTGGTTTATTTTAGGGATTTTG
CTTCTGTAGTTACCCAAGATCAAATAGCCAACTCAGAAATACTCAGTTGGATATCAATCAAATAGTGCCTACC
AGGGGAGTAAACAGACAACTTTTAGGTTTTTAGTTTTTGCTTTTGTGTGGAGTTGAGTCCAATTTTTAAGGCA
ACTATTGTTGACCTTTCTCTAGGCGGTAGCATTTAGGATGGGAAAAAATAATATGAGTTATGTGCGAAAAGCA
GTTTTCAGGCTATCATTTAGGGCCACAGATATGCTTATTTAGGACTATTTTCAGGGTAGGAGCCAGTTAAAGT
TTGTATATCAGTCACACATTGATATGTAGCAGCTCTATCAATACCACAACAACCTTATTACCATAGTAATTCA
GGGGTCTCAAGTAATCCAGGAGTCTCAAACTGAAATGTCAACAAGAGCCAAGTAAATATTTTAGAAATAGAGT
ACCCTGGAGTAGATGGGCTCTGAGAGGAGCCTGTGAAATCCAGACTTCATGTGAATTCTCTTAATTAAATGTG
GGCCAAAGAAAACCCGGCCATGGGCAGTTTTTTTTTCCCAGCTTCTACTAGTCTTGGCTTGCAACAATGCCAC
TGTCCATCTGGCATTACCTAGACCAGTGATACTTAAACTTGACTGCGAATTGGAATCACTGAGAAGCTTTAAA
AAATATTAGTGCCTGAGTGTTACTTTATGGAGATTATGATTTAATTGCTTTGGGTAGGCATCAGTAATTTTTG
TAAAGCCCTTTACGCATTCTCACCCCTAATTCCAGCCGGTGATTCTCACATGCAGACTAGGTTGAGATCCTTG
ATCTAGACTGCCTTCTATAGTTGCAAAAAGAGAATATAGGCGAGCAACTCCAGATCATAAGGGACAAAATGAT
TCAAGGCAAATTGACTGGCTCAGAATAGGGCCTCACTGGAGGCCCTAGTTGAGTGGGTTTTGTGGAATGGTGC
CTCCCAAGGGTCTGGTGTGCAGTGCCCAATTTGGTTTTTTGTTGGTTTTCTGGTAAGTGGTCCACCTTGGAGA
AAATCACAAAACTAAAAGTCTTACCAAGAAGTAGAACTGACAAGCAGCCATGTTGATTGGCAGTACATTCTCT
TACCAAGGGGGAGAAATCTATCTAGGGAAAATAATACAGAGTCTGAGCAAAGGAAGTTGAGTGGTTATAAGCA
AAACTGTCATTAAAGCTAGTTGCGTCAAGTCTGCACAATTCCACGAGCACTTAAGAGTTTACAAGTTTCTCAT
GTCTATCATTCTTTTGATAATCTTGTATTTTTATTTCAAGTGTGGTATAGTAGTAAGAATATTGGTATTTCTC
AGCCATAGATTTCCCTTTTGTAAAATGGGAATACTAATAGGAACTGTAATTTGTTGAGTGCTTTTTGCCAGAT
GCCTTACTTTTGTCTGTATCTTCCAAGCAGCCCTAAAGCAAAATGGGCATTGTTACCCTATTTTTATGAGGAA
AGACACTCATATACTACTAACTTACTCAAAAGTTACACATTGAGTGTATAACAGGGCCATGCTTGTCTGATTC
CATATGTTCATTCTATTATGCTGCTGTTGTCTGTTACATAGGAATATTGTGAGGATCAAAGAACATGTGAAAA
CAAAACCTAGTTACAATAATAAGCACACCAGTGCTAACTTGGGCAAAAGATAAGGATACAGAGCTGTCTCAGA
GACTCCCAAAGGCAGGATGAGATTGGGAACTAGAAAACCATTTTGGACCCCTAAAGTGGTATTGTCTACTATC
TGTACATCATTCTCTTACAGCTCTTACTGCTGCTTTTCCTGTCAGTTACCCCATAGCTCCAGGTATTACATGT
TAACTGTTCCTGACACATGTAGACAGAACCAATCAGATCCATGGGGCAGGATCATCAATACAAACATGGGTGT
TGAGAGCTTAACTTAATCGGGAAGGAGATCTTGGAGATCATAGTTCGCTGGGTTCACATCATGGAAATCGTCT
TTGACAAAACTGAAATGCCCTGAAGTTTTAATTTTTTAAATACATGTAATGAATTGGTATATGGTAGATACTC
GTGGCTACTTAGTATTTACCAAATGCTTTGTTTCCATCTCGTTTATTTTTATTTTTTATTTTTTTAAGAGACA
GTCTTGCTATGTTGCCCAGGCTGGACTTGAACTCCTAGTCTCAGCCAACCCCTTCTGCCTCAGCCTCCTGAGT
AGCTGGGATCATAGGCATGTGCCACTGCTCCTAGCTCTTCCATCTCAGTCTTATGATGTAGTTACTATTTTCA
TTTTATAAATAAGAAAATAGAAGCTCAAATAAAATGGGTAGTTTCCTTGAGGTCATCCTGTTAGTAAGTGGTG
GAATGAAGTTACAAACCTAGGTTTTATTGGTCAGCACACACAGTGCCGGGCACTGGCAGTACAGCAGTGAACA
AAAGGTCTGTTGGTTTGTCTGAAGCTCTCAACCTTGATTCTGCATAGACTCGGTGGATTGCCCAAGGCCACTC
AACCAGTTAATATCAGAGCCAGCTCTGCTGTTTGACCAGTATATTATTTTCACCATGCTGTATCTGCTTCTCA
GTCACCAAAAGCACCAGCTAAAATTGTATATAGACTGATTAGGGGACTTCCAACCTAAGATTGTCCTGGAAAC
TTAATTCTTATCTTGGCTCATCTCTTCAAAACAGATGCCTCTTTCGTTGGTGACCTCAGATACACTGTTCAGA
AGTACTCAAAGTATTCCTTTTTTCTCACATTTGAGAGTCACTCTAGCATTTTAATGAGTTAAGCAAGCCAGCC
CTGCATTTCCAAACCCTTCCCAGAAGTCTAACCTTACTTTGATCTGATGACATGGGCTTTTTAAAAGATTACT
ATTTTTTTAGAGGTGGGGTCTCACTATGTTGCCCAGGCTGGAATATAATGGCTATTCACAGGCACAGTTAGGG
TGCACTACTGCCGTGAACTCCAGGACTCAAGCCATCTTCCTGCCACAGCCTCCTGAGTAACCTAGGACTATAG
GTGCATGCCACCATGCCCAGCTGACAATGGCTTTATATACATAATATTTCCTCAGCAACAATTTATGTCTTAT
TTGGCACCTGTAAAACCCTCTTCACTGATTATGCCTGTTTAAAGGTTTGGTATTTACTCCAAGTCACCTGCCT
TTAGCCATGGAGTATTCAAGTTTCTTTCAGAATGAGAATTTGGAGGGTGCTCATAGAAATATAAAACAAGGCT
GGGCATGGCGGCTTACACCTTGTAATCCCAGCACTTTAGGAGGCTGAGGCAGGTGGATCACGAGGTCGGGAGT
TCGAGACCAGCCTGGCCAACACAGTGAAACCTCATCTCTACTAAAAATACAAAAATTAGCCAGGCATGGTGGT
GCATGCCTGTAATTCCAGCTGCTCGGAAGGCTGAGGCAGGAGAATCGCTTGAACGCGGGAGGTGGAGTTTGCA
GTGAGCCAGGATCACACCACTGCACTCCAGCCTGGGCGACAGAGAGACTCTGTCTCAAAAAAAAAAAAAAAAA
AAAAAAAGAAGAAGAAGAAGAAATACAAAACCAACTCTTTATAGTAGACAGTTTATCCCCCAGAAAGCTTTTT
AGGCTGAAAACGTTTCTATAGATTTTGGATTTCCTTCTGATAGCTAAAATTTGTTTCTGTATAACAGAGTAGT
GCCCTATAAGCCAGTTCAGTGCACATTAAATGGCTGTTCTTAGAATTATGAATCTGAGGCTTATGCAGTGAGG
CTCTAGCTCTCTGGAGTCAGTTGGTCAAGTGGGATTCCTGAGGACTGAGCAAACACACACAGAGCAGGATTTT
GTCCTAAGTTTTCTTAGGGATCCTATCCAAAAACACCATTACTTGAATTTCCCAGCTTCCTTTTACAGGGAGA
CTTCCTTGCTATGTGTACTCCCACCTCGGTATGTCAAATCATTTTCTCAGAGGAAGTACAGCATAAAATAATA
ACCAGCATTTGTAGAGCACTTCTTGTGGGCCTTCTTGGGCAAATAGACATTCTCATGGAATGCTCTAAAATTG
TTAAGTTCTTGCACTTGCTCTCAAGTCATTTATAATCTAATTGCTGGTCTTCCTGGTATGAACAAAGATGTTT
GCTTGTTAATAAATTCCTACCACATACCCAGACTTGTGGTTTATTTCTATCTAACTAGGGAAAGCACTAAAGA
GTTTTCCAATAAGGAAGAATGATCTGAGTGTCTACCTGCTTTGGAAAAGATGTCTGCCATGGATAGGAAATGA
TTTTGTATCCCAAAATCCTAGTACTAATTTGGAGTGTTGTAAAGGTCAGGGCAGCAAATGCTAGAGAGTGGGA
TTAATGAAAAGTTATAGTGTTCTGCATGCCTTTGAATAATTAATTTTTACTCCATTTTTACTCGCTTGCAATA
AAGTAGGTTAAGTGCTGTACTTTAAGGAAGTCCATGTACAAGCCAGTGCCTTAACAATGGTCAAATGGTTGCT
CACTAACCAATGGAAATAAATGACTGTTGTTTCCACAAAATTGCTTTACAGATTCTAAATGCTATCTCTGGGA
CACTGGATTGTGTGCTCTTTAAGATAAATTCCATAATCAAGGGCCTGGCCCTGAATAGATTGGAGCCCAAAAA
TCTCACTGAAGCAAAGAGATAATAGGCCAGTAAAGAGTGGGAGACAAACACTCCTGGAATAGGAAGCCACTAC
TCACCTTTATTTTAAATTGATATATAGAAATTAATATTACAAAATGCACACATCTTAAGTGTGAAGTTTGATG
TTTTGACAGTTGTATACGTCTGTGTAATAACTACCAAAAGAAGACATAATATGTTACAATTAACCCAGAAAAT
TCTCAAGTACTTTTAAATCACCCCTGAGCACCTCCCCACTCCAGTGATCACTTCTTGATTTTTATCACTAAAG
ATTTGTTGTACCTGCTTTTGGATTACATATAAGTGGAATCATATAATAATGTACTCTTTTGCATCTGGCTTCT
TTCACTGATAATGCTTTAAAGACACGCATACTGTATGTATTAGGACATTGTTCTTTATTGCTGAGTAGTATTT
CATTCTATAAATATACCACAATTTGTTTATTCATTCTCCTATTGAAGGACCTTTAGGTTGTTTCCAGTTTGGG
GCAATTATGAATAAGGATGCTATCGATATTCTTACACAGCCTTTTGTTTTTGTTTTTTGTGGATATACATCTT
CACTTGTCTTGGATAAATAAGAGTAGAAAATTACTGGGTCATATGGTAAGTGCATGTTTATAAGAAACTGCCC
TCTTATTCTCCAAAGTGGTTTTACCATTTTGTACTCCTATCAGTGATGTATGAGAGTTACAGTTGCTTCACAT
GTCTGTCAACATTTACACTGTCACTGTTTTTTATATTAGCCATTTTAGCATATATGAAATAACTGATTTTAAT
TTACATTACATTTCCCTGATTAATGAGTTGAGCACTTTTTCATATGCTTATTTTTCATTTGTATATCTTTCAA
GAAGTGTCTTTCATGTCTTTTCTCATTTTAAAGTTGGGTGTCTTTTTATTGTAGGTGTTATTCTTTGTATTTT
GAATATAAATCCTTTGATAGATATGCTATGATTTTTTAAAGACTCTATGTATTCACTTATTGGGATCTTTCGA
TGAACAAATTTTTTTTATAAAATCCACTTTATCAGTTTTTTATTTTATGGTTTTATGACCTCAAAGTCACAAA
GAATATATTTTCTTCTAGAAGTTTTATGGTTTGGGATTTTATGTTTAGGTCTGTGATCCATCTCAAATTAATT
TTTGTGAACAGAATGAGGTTTGGTTTTTTTCCAACATGGATATACAGTTGTTCCAGCAACATTTACTTAAAAA
GACTTTTCTTTACCCATTAGATTGACTTGGTAGCTTGGTTAAAAATTGATCACGTGTGTGTGTATTTCTACAT
TTTCTGTTCTGTTCCATTAATCTATTTGTGTATCCTTACATCAGTACCACACTTTGGATTATTGAAACTTTCT
AGTAAGTCTTTAAATTAGTAAATCCTTCCTTTTTGTTATTTTTCAAGATCGCTTTGGTTATTGTCGATTCTTT
GGATTGTCATAAAAGTTTTACAATTAGCTCATCTTGTTTTTCAAACGTAGATGTGCTGGGTTAGCTGTGTTCA
TGCCACTGCATTCCAGCTTGGGTGACAGCAAGACCCTGTCAAAAAAAAAAAAGAAAAGAAAAAACTGCTAGAA
TCTTGATATGGGGTTTTGTTGAGTCTATAGGTCAATTTAGAATGAACATTTTAATAGTATTGAGTCAGCTAAT
TCATGAACATATTAAGTCTTGTCATTTATTTAGGTATTAAATTTTTTTCTCAGCAATGTTTTGTAGCTTCCCT
TGCGTAACACTTGCTTATCTTACATTAGACTTTTTCTTAAGCATTTGATTTTTAAAATATTTTTGATTTTCTT
TTCTTTTTCTTTTTTTCTTTTTTTTTTTTTGAGACGGAGTTTTGCTCTTGTTGGCTAGGCTGGAGTGCAGTGG
CGCGATCTTGGCTCACTGCAACCTCCGCCTCCCGGGTTCAAGCAATTCTCCTGCCTCAGCCTTTTGAGTAGCT
GGGATTATAGGCACACACCATCATGCCTGGCTAATTTTTGTATTTTTAGTACAGACGGGGTTTCACCATGTTG
GTCAGCCTGGTCTCGAGCTCCTGACCTCGTGATCCAACCACCTTGGCCTCCCAAAGTGCTGCCATTACAGGCG
TGAGCCACCGCGCCTGGCTAATTTTCATTTTTAAGTTGTTTGCTGCTAGTATCTAGAAATACAATTGATTTTT
TGTTTGTTTCTTTAGAGATGGGTCTCACTATGTTGCCCAGGTTGGTCTTAAACTCCTGAGCTCAAGGGATTCT
CATGCCTCAGCCACCCAAGTAGCTGGGACTTTATTCACGTGCCAGTGTGCCTGGCTGATTTTTGTATGCTGAT
CTTGAATCGTGCCACCTTGCTAAATTCATTTATTCTAGAAATAGTTCTTGTAGACTCCGTAGAGTTTTATATT
AAATAGATACACAACAGTGTAGTCTGCAAATAATGTTTTTACTTCTTTTTCTGATTTTATGCCTTTTCTTCTT
TTTTTTTTTTTTTTTTTTTTTTTTTGTCTTTCTCCACTGGCTACAATATCTAGTGCAATGTTTAACGTGTGGT
GAGAGCAGACACCTTGCCTTGTTTTCTTAATCTTAGGGATAAAGATTTTAATGTTTCATCACTAAGTATAATG
TTAACTGTAAGTTTTTCACAGACCAGCCCAAAGAAGTTCCTTTCTATTCCTAATTTGTTGATAATTTTTATTA
GGAAGGGTTATTAAATTTTGTGAGATGCGTTTTTAGCTTTTAATAAGATTATTATGTATTTCTCTTTTTATTT
TGTTAAGATGGTATGTTACAGGGGTTGGCAAACTGTGGCCCATGGGCCAGATCCAGCCCATGGACAGTTTTGT
TGTTGCTGTTTTAGAGACAGTCTCACTCTTTTGCTCAGGCTGCCAGGCTGGAGTGCAATGACATGATCATAGC
TCACTGCAGCCTTGAGCTCCTGGACTCAAGCGACCCTCCTGCCTCAGCCTCCTGAGTAGCTAGGAATACAGGT
GCATGTCACCACACCAGGCAAATTTAAGAAATTTTTTGTAGATCTTGCCGTGTTGCCCATGATGGTCTCAAAC
TCCTGGCCTCAAGCAATCCTCCTGCCTTGGCCTCCTACAGTGCTGGGATTAGAGGTGTGAGCCACCACACTTG
GCTCTCATGGACTGTTTTTGTTTTTGTTTTGAGACAGGGTCTCTGTCACGCAGGCTGGAGTGTGGTGGCATGA
ACGTGGCTCACTGCAGCCTCAACTTTCTTGGCTCCAGCAATCATCCTGCCTCAGCCTCCCGAGTAGCTGGGAC
CACAGGTGTGCGCTACCACAGCTGGCTAATTTTTCTTTTTCATTTTTGTAGACATGGAGTCTTGATATGTTGC
CCAGATTGATCTGGAACTGCTAGGCTCAAGTGATCTTCCTGCCTTGCACTCCCGAAGTGTTGGCATTACAGGC
ATGAGACACAGTGCCCAGCCTATTGCAGTGTTTTTTGTTTTTTCTGTTTTTTTTTTTTTTTTTTCATCTTTGT
TTTTGTTTTTTTGAGACTGAGTCTTGCTCTATCTCCCAGGCTGTGGTGCAGTGGTGCAATCTGCAACCTCCGC
CTCCCAGGTTTAAGCGATTCTCCTGCCTCAGCCTCCCAAGTAAGTGGGATTATAGGCACATGTCACCAAGCTC
AGCTAACTTTTATATTTTTAGTAGAAACGGGGTTTCACCATATTGGCCAGGCTGGTCTTGAACTCCTGGCCTC
AGGTGATCTGCCCACCTTGGCCTCCCAAAGTGCTGGGATTACAGGTCACTAGGCGTAGTAGGGCTACTACGCC
TGGCCCTACTGCAGTTTTTAATAAGAGATGAGTTCTCTCAGCTTTTGTCTATAAGAGAATGTCCTTACTTTTA
TTTTTGAGGGGTATTTTAGTTGGATATAGGACTCTATGTTGACCTTTTATTTCTTCTTTCAGTACTTTAAAGA
AGTTATTTTATTGTACTCAGGCCTCATTTGTTTCTGGTGAGAAGTCATTCATCATTTTAATTTTTATTTCCTT
TCCGTAATGTGTGGTTGTTCTCAATGGCTGCATCTGTGCATTATATTTACTTTTCAGTAGATTGACTAGGGAA
TGTCTAGGTATGTTTTTCTTTGTATAGAGTTTACTGAACTTCTTGGATCTGTGTTGATGTCTTTCATTAATAT
TGGTTCTTTCTTGGCCGTTATCCGTTTACATTTTTCTCTTGTCTCATACTCTCTTGCTTCTCCTCTTCTTTGG
AGATTCTAGTTACATGTATATTAGATGATTTGATATAAACCTACAGATCTCAGATGATTTTTCCCCTGCCCTG
TTTTCTTTTTGTTTTCAGTTTGGATACTTTCCATTTAACCATCTTTAAGTTTTTTGATGCTTTCCAATGTTAA
CCTGTTAAACTTGTTTATTGAATTCTCCATTTAAAAATTTTTATTTTTAGTTATTTATGGATACATAGTTGTA
CTGAATTATTCATTTCTAATATTTTTATTTCTAGCATTTCATTATATTTGTATAGTTACAATTTTCTGCTGAA
ATTTCCTATTTCTTCATGCATGTTTTCCACATTTTCCATTCTACTTTTTAGCATTTTAATCAGTTATTTTATT
GGGTTTTTTCTGTTTTTTCTTTCATTTTTAATCAGTTATTTTAAGGATCCAAACTGATAATTCAACATCTGGG
TCTTTTCTAGTTCTGCTTCTATTGAGCCCTTCCTCTCCCTTACCATGAATCTTATTTTCTTGCTTTTGCACGT
CTTGTATATTTGATTGGATGATGGACGTTTTATGTTGAAAAAAAAAAGAAATTGAAGAAAATGTTTACTTCCA
AAACAGAGCATGCCCTTTGTTTTTTTTTCAGGCCACTTGAATGGTGGCTCAATCTGATGTATATGAATTCTAG
ACTGGGGCTTCACTGCAGTTTTAGTTTGATTCAGTTTGCCTCTAGCTTCAAATATTTGAAGGAACGTAGAATC
AGAACTCTCATATCACCAGGGCCTGAGTTTTGGGCATTGGCAAGATTCCAGAGATCTGACTTTGCTTCATAGC
TAAGCCACCAGCTTTTATCAATGTGGGAGATCTTTCCCTACTTTACAACCTTGCTGCCAGGATTTTTTTTTTT
AATCAATGGGCTGGGGATAGGAGGATCTTTCTCAGCTCTCATGTGTGCCCTGCCCTTTTGTAGAGGAATGCCC
ACAATGCCTAGGGGATGGGTTTCTCAGCATTTCTGACCCCATTTAGGCTCCAAGAGTGCCTCTGTTGGATTTC
ACAACAATCCTGCCTCCCCTTTCATTTTTAAAGGGTATTTTGCCCTTGGGAGAAGTCAAGCTCTCTCAGCGTT
CCTTCTATTATCCACACCTTTAGTGTACTACACCTTCCTGTACCTGGTTATCATCTAAGGGGTAAGATTGGTG
GGAAGCCTTCCTCTGTGGATTTGGGTCATCTAGGTTCTAATGTCAAACCAGCCTCCAAGGGGTTGTGAAAATG
TTGTTAAATTTCAGCAGGTTTCTCTTTTCTCCCCCCTGTAGTATTCCTCTTCCTACCATAGTTCAACTAGGAA
TAACAACAGCTAGGGGGTCTCTTCTCTCCTATGAAGGACTTGGCACTTTCTGGAGTTTGGATCATTTAGGTTT
CTTTGGTTTTTGTTTTTATTTTGAGACAGGGTCTCACTCTTACCCAGCCTGGAGTACAGCCTGTAGTGATCTC
AGCTCACTACAACCTCTGCCTTCCTGGCTCAGTTGATCCTCCCACCTCAGCCTCCTGAGCAGCTGGGACTACA
GGCGTGTACCACCACACCCGGCTAATTTTTGTATTTTTTGTTGAGATAGGGTTTTACCATGTTGCCCAGGCTG
ATCTCAAACTTCTGAGCTCAAGCGATCTGCCTGCCTCAGCACCCCAAAGTCCTGGGGTTACAGGCATAAACCA
CTGCACCCAACCTAGATTTCTTTGTGTCCTTAGCTTTCTGATGAATTAAACATATGTTTTATTTTCTAGCTCA
TCTGGCCTTTTGTTGTTGTTTGCTAGAGTGGGAGGTATATTCCTTGTGACTTTGTTCATATCACTAGTGAATT
TCAGAAGTAGGAGTTTATTTTTTTAATAAAAAATTTTTTTAGGTCAGGCACAGTGTCTCATGCCTGTAATCCC
AGCACTTTGGGAGGCCGAGGCAGGTGGATCACCTGAGATCAGGAGTTTGAGACCAGCCTGGCCAACATAGTGA
AACCCCAACTCTACTAAAAATACTAAAATTAGCCAGGTGTGGTGGTGGGCGCCTGTAATCCCAGCTACTTGAG
AGACTGAGTCAGGAGATTTGCTTGAACCTGGGAGGCGGAGGTTGCAGTGAGCCGAGATTGTGCCACTGCACTC
CAGCCTGGGTGACAGAGCAAGACTCCCTCTCAAAAAAAAAAAAAAAAATTTTTTTTTAAACACGTCTCACTGC
CACCCAGGCTTGAGTGCCATGACATGATCATAGCTCACTGCTGGCTTGACCTTCTGGGCTCAAGTGATCCTCT
TGCCTCAGCCTCTTGAGTAGCTGGGACCACAGTCATGTGCCACCATGCCTGGCTTTTTTTTTTTTGTAGAGTT
TGGGTCTCGCTATGTTGCCTGTGATCCTCCCACCTTGGTTTTCCAAAGTGCTGGGATTAAAGGCATGAGCCAC
CATGCCTGGTTAGGAATGGGAGTTTAAACAATGGTTTTATTTACATATTTCATTAGCTAGTATTTTTTTCTTT
TTTGAGACAGAGTCTGGCTCTGTTGCCCAGGCTGGAGTGCAGTGGCACGATCTAGGCTCATTGCAACCTCTGC
CTCGTGATTCTCGTGACTCAGCCTCCTGAGTAGCTGGGATTACAGGCGCCCGCCACCACACCCAGCTAATTTT
TGTATTTTTAGTAGAGACAGGGTTTCACCATGTTGGCCAGGTTGGTCTCCAACTCCTGACCTCAGTTGATCCA
CCCGCCTCAGCCTCCCAAAGTGCTGGGATTACAGGTGTGAGCCATCGCTCCTGGCCTCATTAACTGTTTTCAA
AAGTAAAAGTACATGGATAATACAAAGTTAAATTTTGTAGAATCATAAAGAAAAGCAACACCTTCCCATCTTA
ACTCCCCTAGTGCCTCTACTCCCTCCACAGAGACAAATATCTTACCAGTTGGTTGTGTTTTCTTTTCCAAACT
GTATTTCTAAAATGTGTCAATATCTCTTCCTTTTATTTTTTATTTTTTGTAGAGACAGGGGTCTCACTGTGCT
GCCTAGGCTGGTCTCAAACTCCTGGCCTCCTACCTCGACTTCTCATAGTTCTGGCGTGAGCTACTGCACCTGG
CCTCCCCCTTATTATTTTTTTAAACATGAATGGAAGCATACTATATTTTCTACACTTTATTTGTTTTATGTAA
CTATTTTAACAACCTGAGGACTTTTACAGGCTGCATAATATGTCTTAATATGGATGTATCTTAGTTTATTTAA
ACAGTTACTGGTGATGGACATTTCCATGTTTCCAGTATTTTTTCTCACAAACAATGCAGTATTATGCCTTTGT
CCACATTCACCATTGATTGCTATTGAGTATATCTGTAGCATCAAGAATAGGCATACTGAAAATCCTCCATGAA
GTCCAGTGAAGCTTCATATTATTTTGAAGTGATATTTCCCAGTGTTGGCTGGACTCTCAAGCGTTTGTGGTAT
AGGTTTTGGGAGGACTGGACACTTCCAAAGAGAAATAAGATGTTACAGACTTGTCCAGCAGGTGGCATCAGAA
CAAAGCTGGCTATGGACCTTGTCAGTACAAATGATAAAACATTAAAAATGTAAAAACTCAACTGTAGCTCCTT
GTTTATACATATATTGGGGGTGTTGAAAAGTTACCGATGCCTGATTCCTCTTCTATGTCCTCAGCCCCCACCA
TAAAAATAGATAAATGCCATTTTTTTTGTATGCCCAGCACAGCTATATGATTTGAATAATCTTGATAAGCAGG
GTCACATTTGAGGAGATTTGCTAAGGGAAATGAAGATCCATCTGTGACACAAGAAACATGTTCTATGTGATTT
CTGGGATTTTCCTGTGAACATACTTCTTGTTTGTTTGTTTTACAGTGGATCTCACTCTGTCACCCAGGCTGGA
GTTCAGTGGTGCAATCATAGCTCACTGCAACCTTGAGCTCCTGGGCTCAGGAGAGCCTCTCTCCTCAGTCTCC
CAAGTAGCTAGGACTACAGACACATGCCATCATGCCAGGCTCATTTTAAAATTTTTTGTAGAGACGGGTCTCA
CTATGTTGCTCAGGCTGGTATTGAACTCCTGGGCTCAAGCAATCCTCCTGCCTCAGCATCTCAAAGTGTTGGG
ATTACAGGTGTGAACCATAGTATCCAACCTATTATGTTTTTTTAAAAAGAGATTGTTCTAATTATGTATATAA
TTAAAGTACATTAGGTTTAGTGATTGCAATTTGAGAAACCAATGTCCTTTCTTATTGAAAAAGGCCCTGGTAC
AGAAAGTGTTCTATCTTCCTCACAAGATCTGAGGTCAAAGGAGAGATTTTGAAACATTATAGCAATGGCTTCT
AGTTATTGAATAAAGAATGTCATTTGCTCCTCACAGGACCCCTTTCAGGGAGATTTCACATATTGGGAAACAG
CCTCATGAGCTTTCTACAAACATCTTTGTCCTTAAGTCTTCCCATTTCAGTAATTGGCTGTACCACTCATCCA
GCAGCTTTCAAAGTAAGAAACCTGGCAATCTTCCTTTAACATCCATTTCCCTTTCCCTCATTCCCCCATATCC
AATCATGTGTATTGGAGGTTTTTCCACCTCTAAACTTGAGAACCCATTTACTTTTTCTCCATCTCCTTTGCCA
TCACACTAGTCCAAGTGAAGTGTTTCATCATCTCATTTGCAGCATCCTTTAGTTTACCCTAGATTATCAATTT
TTGTCCCCCTCCCAATTCAGTCTCTACTCATGAGCTAACATGAGTTTATTAAGTGTTCATTCTGACCATGCCA
TTCCTTGCTCAAAATTCTCTAGTGCCTTCCCAATGCCCTTAAAATAAAATTCCTCATATGGCCTTTGTGGATC
TGCACTCCTACCTCTTCTCCTATTGCAACCAACCCTGTTACCTTTTTCTCTTTTCACACTGGTCTTCATTCTG
TGCTGCAAACTGGCTGAGATTCTTCCATCCTCAGGGCCTTTGCACAAGTTCTTCCTTTGCCTTAGAATTCTTT
CCTGGCCTGCACATGTCTTCATCCCCTTTCCCTAAGCTAATGCCTTACCCTTTAGGTCTCATTTTAAACATCT
CTTACCCAGGAAAAATTTCCCTGTCCAAACAAGTCTAGATTGGCTCCCCATTGTTTGTTCTAACTGTTCTATA
TTTCTCCTTCTTAGCATTTATCACAATTCTTGGTATGTTGTGCTTTTCACTTTCTTAGTCGCTATTATTGGAG
TAGGTAATACATCCATATAGTACAAAATTCAAAATGTATTAAAGGTATAGAGTAAAAAGTCTTCTCTTCCCTG
TCCCCCCGCTACCCAGTTCTCCTCTTTAGAACCACTTTTAGCATTTTGAATATCCTTCCAGAAATATTTTCTA
AGTATACAAGCAATTATGTATATAATATTCCTCTTTATTTTTGCCTTTTTATTAATACAGATACTATATGCAT
TTTCTGCACTTTATCTGTTAATAATATATCTTGGCAATTATTCAATATTAATATGTAAATAGTTGCCTCTTTC
TTTTTCATGCGCCATATAATATGGACTTATAATTTATTTAACCTCTATCTAGGTTGGTTTTAGGCATTGGTTA
TTACAAATAATGCTGCATTGAATACCTTTGTATGTAAAGTCATTTCCCACATCTATGCCTATAGAATAAATTA
CTAGAATTGAAATAATTCAGTTAAAGATTATGTGCATTTTTAATTTTGGTAGTTATTGCCAAACTGCTCTCAA
TGGAAGTTTTATGAATTCCCACTAGTGAATGCATTTGTCCTCACAATTATGTCAGTGAAATTTTTGTTCTTTG
CCAATGCAAGAAATGGAAAGTATCTCTTGGAAACTAATTTGCATGTTTTTTTTCCTTGCACAGTTATATTTTC
ATATGTTAAAGAGCCATTTGTATTTCTTGGTGAATTGTTCATAAACTTTGCTTACTTATTATCTAATGTCTGA
CTAATTTGCTACACTCTAAATTCCCAATTCATACTTAAGTCTCGCCCTTGCAATTTAGATGTACAATCTGCCT
CTTCAGTGGTTTCCACACCAAAAAATCCACAGGCTCCTGAATTTTATATGGGCCTAAGAGTCTTACTGAAAAT
TGGAAGTCTTAAGGTGTAGTCTATTTTATGCAGTGTGAGGCCTTTCATGCTCTGAAATGTACCACTCTTGACT
GACTTTTTCTTCTTCACCCTGTCCGGCACTGTGCCCTTATTAGCCAGAGAAATGTTCCCCCTTTCTCCCAGGA
AACGTTCTGACCTTACCCTGGTCCCTCAAGGACTCTCCTTCTCCCCCAAATTAACTTTCAAGGAGTTTCTCCA
ACCCAAAATGGCACCCTTCCTGAAAAGATTTCTAGTGGATACTGTTTTCTGTACCTCACTACGGATGTATTTT
GCTGCTTGGCTCCCCGTCTCCATTTTGCTATGGCAAACATTTTTTTCCAGAAATATATCAGATAAAATGAA
(SEQ ID NO: 119)
MDSDEGYNYEFDEDEECSEEDSGAEEEEDEDDDEPDDDTLDLGEVELVEPGLGVGGERDGLLCGETGGGGGSA
LGPGGGGGGGGGGGGGGPGHEQEEDYRYEVLTAEQILQHMVECIREVNEVIQNPATITRILLSHFNWDKEKLM
ERYFDGNLEKLFAECHVINPSKKSRTRQMNTRSSAQDMPCQICYLNYPNSYFTGLECGHKFCMQCWSEYLTTK
IMEEGMGQTISCPAHGCDILVDDNTVMRLITDSKVKLKYQHLITNSFVECNRLLKWCPAPDCHHVVKVQYPDA
KPVRCKCGRQFCFNCGENWHDPVKCKWLKKWIKKCDDDSETSNWIAANTKECPKCHVTIEKDGGCNHMVCRNQ
NCKAEFCWVCLGPWEPHGSAWYNCNRYNEDDAKAARDAQERSRAALQRYLFYCNRYMNHMQSLRFEHKLYAQV
KQKMEEMQQHNMSWIEVQFLKKAVDVLCQCRATLMYTYVFAFYLKKNNQSIIFENNQADLENATEVLSGYLER
DISQDSLQDIKQKVQDKYRYCESRRRVLLQHVHEGYEKDLWEYIED

[0120] An amino acid sequence for the protein encoded by the ARIH2 gene that is a regulator of T cell exhaustion/dysfunction resistance is available from the UniPROT database at accession no. 095376. cDNA NM_001349210, with gene location at Chr 3: 48918821-48986382.

(SEQ ID NO: 120)
ACTTCCGGAGCTGTGGGGACGACTCTTCTGGAGGAAGCAGCGCGGGCTTGACCGGCGTCGGCCCGCCGCCTCC
GCTGCCGCTTCGCCCCAATCCGGTCCCTCTGGCCCGGCCTGACCCGGTCTGGCTTGTTCGGGCTCAGCGGCCG
CGAGGCCGCAGCTCCCGATGGAAATCATATTATGTAGAATACTTGGGTGACATCTGCCTGAGAGATCTCCAAG
AATTACAGATTGAGTCTCGCTCTGTTGCCCAGGCTGGAGTGCAGTGGTGCAATCTCTGCTCACTGCAACCTCC
GTCTCCCGAGTTCAAGCAGTTCTCCTGCCTCAGCCTCCTGAGTAGCTGGGATTACAGAAGACAAAAATACTAA
TGCATTTGAGAAAGCGGTAGTTTTGGGGGGAGGGGGAAAAAGCAACTGCTTTCCTGATCTGCAACTTGGCTGG
ATGCTAAGATGTCAGTGGACATGAATAGCCAGGGGTCTGACAGCAATGAAGAGGACTATGACCCAAATTGTGA
GGAAGAGGAAGAAGAAGAAGAAGACGACCCTGGGGACATAGAGGACTATTACGTGGGAGTAGCCAGCGATGTG
GAGCAGCAGGGGGCTGATGCCTTTGATCCCGAGGAGTACCAGTTCACTTGCTTGACCTACAAGGAATCTGAGG
GTGCCCTCAATGAGCACATGACCAGCTTAGCTTCTGTCCTAAAGGTATCTCATTCAGTTGCTAAACTTATATT
AGTTAATTTCCACTGGCAAGTTTCAGAGATATTGGACAGATACAAGTCCAATTCTGCTCAACTGCTTGTTGAG
GCTCGAGTTCAGCCTAATCCATCAAAACATGTTCCCACATCCCATCCCCCTCACCACTGTGCAGTGTGTATGC
AGTTTGTGCGAAAGGAAAACCTACTCTCTCTGGCCTGTCAGCACCAGTTTTGCCGCAGCTGCTGGGAGCAGCA
CTGCTCAGTTCTCGTCAAGGACGGCGTGGGCGTGGGAGTCTCTTGCATGGCTCAGGACTGTCCACTCCGTACA
CCAGAGGACTTTGTGTTTCCATTGCTTCCCAATGAAGAATTGAGAGAGAAATACAGGCGCTACCTCTTCAGGG
ACTATGTGGAGAGTCATTACCAGCTCCAGCTGTGCCCTGGTGCAGACTGCCCCATGGTTATTCGGGTACAGGA
GCCTAGAGCTCGCCGAGTACAGTGCAATCGGTGCAACGAGGTCTTCTGTTTCAAGTGTCGTCAGATGTATCAC
GCACCCACAGACTGTGCCACAATCCGGAAATGGCTCACGAAGTGTGCAGACGACTCTGAAACAGCCAACTACA
TTAGTGCTCACACTAAAGACTGTCCCAAGTGCAACATCTGCATTGAGAAGAATGGAGGCTGCAATCACATGCA
ATGCTCCAAATGTAAACACGACTTCTGCTGGATGTGTCTAGGAGATTGGAAGACTCATGGCAGTGAATACTAT
GAGTGCAGTCGTTACAAGGAGAATCCTGACATCGTGAACCAGAGCCAACAAGCCCAGGCGAGGGAAGCCCTCA
AGAAGTACTTATTCTACTTTGAGAGGTGGGAAAACCACAATAAAAGCTTGCAGCTAGAGGCACAGACATACCA
GCGGATTCACGAGAAGATTCAGGAGAGGGTCATGAACAATCTGGGGACATGGATCGACTGGCAGTACCTACAG
AATGCTGCCAAGCTCTTGGCCAAGTGTCGATACACCCTGCAATACACCTACCCATATGCATATTACATGGAGT
CCGGACCCAGGAAGAAGCTGTTTGAATACCAGCAGGCTCAGCTGGAGGCTGAGATCGAAAACCTCTCATGGAA
AGTGGAGCGTGCAGACAGCTATGACAGAGGGGACTTGGAGAACCAGATGCATATAGCGGAGCAGCGGAGGAGA
ACCCTGCTGAAAGATTTCCATGACACCTAAGTTGGGATGTGGATGTGCCGGGGTGAGGAAGATGTGGCTGCAA
GGTCTCCCGGCTGCCATACTGCATGCTGCAGGCTCTGCCTTTCATGACCCCAGGCAACAGCCAGGGCCCCACT
CCTGAGAGACACTGGCAACACCTCTTAGTTGATTTCTGTTTTCTTCTCTTTTCACTTTTTGTTTCTACCAGGG
TAGAGGCCATGTTGAACTGGCCTCTTTTCAGGACTTTTATTTCCCCCTGGATGGTTGTTGGGAGGGAGGGAAA
GTGTTTTCTGAATGGCTATTAATAGTATTAGATCATTACAACTTATGTAACTTTCAAAGGTTGTACAATTATA
CAAAAAAAAAAAAAA
(SEQ ID NO: 121)
MSVDMNSQGSDSNEEDYDPNCEEEEEEEEDDPGDIEDYYVGVASDVEQQGADAFDPEEYQFTCLTYKESEGAL
NEHMTSLASVLKVSHSVAKLILVNFHWQVSEILDRYKSNSAQLLVEARVQPNPSKHVPTSHPPHHCAVCMQFV
RKENLLSLACQHQFCRSCWEQHCSVLVKDGVGVGVSCMAQDCPLRTPEDFVFPLLPNEELREKYRRYLFRDYV
ESHYQLQLCPGADCPMVIRVQEPRARRVQCNRCNEVFCFKCRQMYHAPTDCATIRKWLTKCADDSETANYISA
HTKDCPKCNICIEKNGGCNHMQCSKCKHDFCWMCLGDWKTHGSEYYECSRYKENPDIVNQSQQAQAREALKKY
LFYFERWENHNKSLQLEAQTYQRIHEKIQERVMNNLGTWIDWQYLQNAAKLLAKCRYTLQYTYPYAYYMESGP
RKKLFEYQQAQLEAEIENLSWKVERADSYDRGDLENQMHIAEQRRRTLLKDFHDT

[0121] An amino acid sequence for the protein encoded by the ATF7IP gene that is a regulator of T cell exhaustion/dysfunction resistance is available from the UniPROT database at accession no. Q6VMQ6, cDNA NM_001286514, with gene location at Chr 12: 14365676-14502931.

(SEQ ID NO: 122)
GCGCGCGAAAAGCTGAGGCGGCAACGTCGGGGACGGCTGCGCGGGACGGCTCTGTAGGAAGGAACTTGGTTCC
CCCTCCCTCAGCTTCCGCCCCAAAAGATTCAGAATGGACAGTTTAGAAGAACCTCAGAAAAAAGTCTTTAAGG
CTCGAAAAACGATGAGAGTGAGTGATCGTCAGCAACTTGAAGCAGTGTACAAGGTCAAAGAAGAACTGTTGAA
AACTGATGTCAAGCTGTTAAATGGCAACCATGAAAATGGAGATTTGGACCCAACCTCACCTTTGGAAAACATG
GATTACATTAAAGACAAGGAAGAGGTGAATGGCATTGAAGAGATTTGTTTTGATCCTGAAGGAAGTAAAGCAG
AATGGAAGGAAACACCCTGTATCCTAAGTGTTAATGTAAAAAACAAGCAGGATGATGATTTAAATTGTGAACC
TTTGTCTCCCCATAATATAACTCCAGAACCAGTCTCTAAACTGCCTGCTGAACCAGTTTCTGGTGATCCAGCC
CCTGGTGATCTGGATGCCGGAGATCCAGCCTCCGGAGTACTGGCCTCTGGTGATTCCACCTCTGGTGATCCCA
CCTCTAGCGAGCCCTCCTCTAGTGATGCTGCCTCTGGTGATGCAACCTCTGGTGATGCCCCTTCTGGTGATGT
GTCCCCTGGTGATGCCACCTCTGGTGATGCCACTGCTGATGATCTCTCCTCTGGTGATCCCACCTCTAGTGAT
CCCATCCCAGGTGAACCGGTCCCTGTTGAACCCATTTCTGGTGATTGTGCCGCTGATGATATAGCCTCTAGTG
AAATAACTTCTGTTGATCTGGCTTCTGGAGCACCAGCTTCCACTGATCCAGCCTCTGATGATCTGGCCTCTGG
TGATCTATCCTCTAGTGAACTGGCCTCTGATGATCTGGCCACTGGTGAACTGGCCTCTGATGAGCTGACTTCT
GAATCAACCTTTGATCGTACCTTTGAACCAAAGTCTGTACCAGTTTGTGAACCAGTTCCTGAAATTGACAATA
TAGAACCAAGTAGCAATAAAGATGATGATTTTCTTGAAAAAAATGGAGCTGATGAAAAATTAGAGCAAATTCA
GAGTAAAGACTCATTGGATGAGAAAAATAAAGCTGATAATAATATTGATGCTAATGAAGAAACTCTAGAAACA
GATGATACAACTATTTGTTCAGATCGACCTCCTGAAAATGAAAAGAAGGTAGAGGAAGATATTATCACAGAGC
TTGCTCTTGGAGAAGATGCTATATCTAGCAGTATGGAAATTGACCAAGGTGAAAAGAATGAAGATGAAACTTC
TGCAGATCTTGTAGAAACGATTAATGAAAATGTTATTGAAGATAACAAAAGTGAGAATATCTTAGAAAATACA
GACTCTATGGAGACAGATGAAATCATTCCTATTTTGGAAAAGCTTGCACCTTCTGAGGATGAACTTACTTGCT
TTTCTAAAACATCTCTCCTTCCAATCGATGAGACAAATCCAGATTTGGAAGAGAAAATGGAAAGTTCTTTTGG
TTCACCATCTAAACAAGAAAGTAGTGAGAGTTTGCCAAAAGAAGCCTTTCTGGTCCTCTCTGATGAAGAGGAT
ATTTCGGGTGAAAAAGATGAGTCTGAAGTTATATCGCAAAATGAAACGTGCTCTCCAGAAGTAGAAAGTAATG
AAAAGGACAACAAACCTGAGGAAGAAGAGCAAGTAATACATGAAGATGATGAAAGACCTTCTGAGAAAAATGA
ATTTTCTAGACGAAAACGTTCTAAATCAGAAGACATGGACAATGTACAGTCTAAACGTCGTCGATATATGGAA
GAAGAATATGAGGCAGAATTTCAAGTAAAGATTACAGCCAAAGGAGACATTAACCAGAAACTTCAAAAGGTTA
TACAGTGGTTGCTGGAAGAAAAATTGTGTGCGCTGCAGTGTGCTGTATTTGATAAGACTTTGGCAGAATTGAA
AACACGAGTGGAAAAGATTGAATGTAACAAGAGGCATAAAACAGTTCTCACTGAACTACAGGCCAAGATAGCC
AGGTTAACCAAACGCTTTGAAGCAGCCAAAGAAGATCTTAAGAAAAGACATGAACATCCACCCAACCCACCAG
TATCACCAGGAAAAACTGTAAATGATGTCAACAGCAATAATAACATGTCTTACAGAAATGCAGGCACAGTGAG
ACAGATGCTGGAGTCCAAAAGAAATGTAAGCGAGAGTGCACCACCATCCTTTCAAACTCCTGTGAATACAGTA
TCTTCAACCAATCTTGTCACTCCTCCAGCAGTTGTCAGTAGTCAACCTAAATTGCAGACTCCAGTGACTTCGG
GTTCCCTCACAGCAACGTCAGTTCTTCCTGCACCCAATACAGCTACTGTAGTTGCTACTACTCAGGTGCCTAG
TGGAAATCCCCAGCCTACAATCTCTTTACAGCCTTTGCCAGTGATTTTGCATGTACCTGTTGCAGTATCCTCC
CAGCCTCAGCTTCTACAGAGCCATCCAGGGACTTTGGTGACTAATCAACCATCTGGCAATGTTGAATTCATTT
CTGTGCAAAGCCCACCTACAGTGAGTGGTCTTACCAAAAATCCAGTATCCTTGCCATCCTTGCCAAATCCCAC
TAAACCAAACAACGTTCCTTCTGTGCCCAGTCCTAGTATTCAAAGGAACCCTACTGCCAGTGCTGCACCATTG
GGAACAACACTTGCTGTGCAGGCTGTTCCAACAGCACACTCTATTGTACAAGCCACAAGGACTTCTTTACCCA
CAGTGGGCCCATCAGGACTCTATAGTCCATCAACTAATCGAGGTCCTATACAGATGAAAATTCCAATTTCTGC
ATTTAGTACTTCGTCTGCTGCAGAACAGAACAGCAATACCACCCCAAGAATTGAAAACCAGACAAACAAAACA
ATAGATGCTTCTGTCAGTAAGAAAGCAGCTGATAGCACATCACAGTGTGGAAAAGCCACTGGCAGTGATTCAA
GTGGTGTCATTGATCTCACAATGGATGATGAAGAGAGTGGAGCTTCACAAGACCCCAAAAAACTAAATCACAC
TCCTGTATCAACCATGAGTTCTTCTCAGCCTGTGTCACGACCATTGCAACCCATACAACCAGCACCGCCTCTT
CAACCATCTGGGGTGCCAACAAGTGGACCATCTCAGACCACCATACACTTACTACCTACAGCTCCAACTACCG
TGAATGTAACACATCGTCCAGTAACTCAGGTGACCACAAGACTCCCTGTACCAAGAGCTCCTGCAAACCACCA
GGTGGTTTATACAACTCTTCCTGCACCACCAGCTCAGGCTCCCTTGCGAGGAACTGTTATGCAGGCTCCTGCT
GTTCGGCAGGTCAATCCCCAAAATAGTGTTACAGTTCGAGTGCCTCAAACAACCACATATGTTGTAAACAATG
GACTAACCCTGGGATCAACAGGACCTCAGCTCACAGTGCATCACCGACCACCACAAGTGCATACTGAGCCCCC
ACGCCCCGTGCACCCAGCACCCTTACCAGAAGCTCCACAACCACAGCGTCTGCCCCCAGAAGCTGCCAGCACA
TCTCTGCCTCAGAAGCCACACTTGAAGTTAGCACGCGTTCAGAGTCAAAATGGCATAGTACTGTCATGGAGTG
TCCTGGAGGTGGATCGAAGCTGTGCCACTGTTGATAGCTACCATCTCTATGCTTACCATGAGGAACCCAGTGC
CACTGTGCCCTCACAATGGAAAAAGATTGGGGAAGTCAAGGCACTTCCCTTGCCCATGGCATGTACTCTCACC
CAGTTTGTATCTGGTAGCAAATACTACTTTGCAGTACGAGCCAAGGATATTTATGGACGTTTTGGGCCTTTCT
GTGATCCTCAGTCAACAGATGTGATCTCTTCTACCCAGAGCAGTTAAACCTTGGAGCCTTTATATTTTCCTCT
TTTAAAATTTCCACCTTTTGGTCTTGTTTTTAATCTTGTGCATGATACCCCATGTAAAATCCACCTTGTGCAA
GATTTCTTGGACAGATGTGTGTATACACTACATTTGTTTATAACCAGAAGCAAAATAAACTCAGCCCACAAAG
CTAGAATCTTTTCCTGGACAGTTTAGGCTTTGGGGTTTGGAAATGTAAATGTGTACCTTGCTTTAGTTTTGAG
GCTGGGGAATATGTGTGGGTGTTTATGTGTGTTTTTCCTTATGTAGGTGTTATTGCATTGGAGTCTCCCATTT
TCATTCTCAAATTTACCTCTTAAAGTACGAAGTAAGTAGATCAAAGGATTTGAGATGTGTAACTGGCATGATT
CTGCTTTTGAAGGATCTATAGTATCATTTTAGTTAAGTGGGTCAAACAGAATCAAAACAAAACCCAAAGAAAT
AAATAAAAAACAAAATGGCTAAATAGTTTAAAATAGGTTAATTCGAACACAGGAAAGGATCTATTTGTTGTTT
CTTTTGTCTGGTCTCCTGAGTTGTTAATTAGGTGAAAAAAGATCTGCAATGGCCCCCTCCCTTTCCTAATCTG
GCTTTTACATTTATTTTGTGCCTTAAAGATTAACTACAAAGATAAACATGGCCAAAAATAAATAAATAAATAT
GGCCATATGTCCGTTGTTGCTTAGTCTTCCCTTGCAGCCTTTTACCCTTGATTTCTCCTTCATCTCTACCAAA
TATAGCACAACTCCTCAAGTAATTTTTTTTTTTTAAGATGGAGTTTTGCTCTTGTTGCCCAGGCTAGAGTGCG
GTGGCACAATCTTGGCTCACTGCAACCTCTGCCTCCTGGGTTCAAGCAATTCTTCTGTCTCAGCCCCAGAGTA
GCTGGGATTACAGGCACCTGTCACCATGCCCGGCTAATTTTTGTATTTTTAGTAGAGATGGGGTTTCACCATG
TTGGCCAGGCTGGTCTTGAACTCCTGACCTCAGGTGATCCACCCGCCTCGGCCTCCCAGAGTGCTGCGATTAC
AGTTGTGAGCCACTGTATCCAGCCTACTCAAGTGATTTTTAAACCAAGGTGTGTGTATGTACATGGATGTGTA
TGTACACACACACACAGGTGCATGCATAGTCTCATCTTAGCCGGGCATGGTGGCGACAATCACATTTAACTCC
AAAAATTTGACGTGCTATTTTCTTCTAAAACTATAGATGCTTTTATTTTTGGTCACTATTTAACTTTGTGTAA
AGTGGACCAAGAGAAAACCATATTGTGGAAGACAGTTTTTCACACATTTTAGTATCCGTGTTGCACACTGTGT
TAGAGATTATGAAAACCATTCTAGTTCAGTTTATCACCCAAAGCTATCACCCAACACTAACTCCTTAGTATTC
TTTCAAAGGAAGCAAATAGTAAGATTACAATATAGAATGAGCTAAAATATCAAGGGGAAAGCTTCATTTCCTC
TTTATTCTCTTTATCGTCCTTCCCATTTTAACCTTTTAACTTTGTTTTGATGGTGCCAAGTTGAGTCTGATGT
ACCCATTGTTAGCTTTGGATAGAATTTAAAGTATATCCCAGAATTAGCTGGGCATGTTGGTGCATGCCTGTAA
TCCCAGCTACTCAGGAGGCAAGGCTGGAGAATCGCTTGAACCCGGGAGGCGGAGGTTGCAGTGAGCTGAGATT
GCGCCATTGCACTCCATCCTGGGAGACAAGAGCGAAACTCTGCCTCAAAAAAAAAAGAATTTAAAGTATATCC
TTTGAGGTCATTTTATGTAACAATTAGATATAACCTCCTGTGTATCTCTCTGTTCCTCTTCAAAGTTATTAAA
ATTCAGCTTAGGTCATGGATTTTTAATATGAGGGCCAGCTGTACTGGTGTCAGGTAGGTGTTTTGGGTGTAGA
TAATTTAGGACTGGAGGGCTGAGTTAAGTTTTAGGAGGAGAATGTGGTTGAGAATATTTTGAAAGGAATTTAT
GGAGTTTGTGAAATAACTTCGAAGTCCTCTTCCTTTACAATATTTGAATTCATATTTGTACCTTCTCAAAATA
GTGATTCATTTTTCCTAGAATTACAGGAGGGAGCTCTTTTACTAATGTTGTTTTGTTTGCAACTTTGATGGCT
TATAATAGGAAGTATTCTAGTTGTAAAGAAAACTCTTTAGAGACTTTTGACTGGTCAGTATACTGAGGTGTGA
GATTTGATTCATGATGAAGAAAGCCTATAGATTGCCAAAAAATTAATTCTCCAAACCACCTTTCACTCTCAGA
AAATGAGACCACAAAGGAGTATGCTATAAATCAAATTTGCCAACCAATTATGTAGATATTACTCATTCTAGGA
CTAATGATGATGGTAAAGAAGTTGCCAGTGTTATGGCAATGAAAATTTCAGAAAGGAGGAGTTGATGATCTTC
TAGATGTATATGAACACCTGTCTATATCTGCATGTATATGTTTTGACCTGCAGTGGTTGCAATGTTGATATGT
GTTCAAGATTATTCCTGTCTACAAAACTGAAGGCCCATGTTCAAATTGTTCTTTATTGGGTGTTTTTATGGTC
ACGTGGTAACAATTTTCTTACCTAACCTACAAAAGGTTCTCTTGATGAACATTTTTATTTATATTTACTAATC
TTTTTTAAAAAAAGCTTTCATAGCATTATATAATCAGATGAAGAAAGCCCAGTAGAATAAAAAAAAAATTCAT
TAGCCTAGCCTATATTATGTTTTCTGTCAAAGGAAAACAAATTCTCAAATAGGAATTCTAAAAATATTTACTA
AAGTAAAATAACTACTTAAAATGTTTTATTCCAGTTGGAAGGAAGGTACAGGGAGAAATCGCAATTATTTAGG
GGAGAAGTATATTTATTATAAGATGGTGTCCTCAAATTAGCCTACCATGGCACGTAGGGGCAGCAGCTATATT
AGATTTACTAGAGGTGCTAAGTTAGAACACTAGGCTTTTATTGAGGCAGGTTTTAATATTGATAGATGCTTTT
TGTTTGGTTTGTTTCTTCTGGGAGAGAATGGAGGACTTAAGTAGAAGTAGCTACTGATAACAGACTTTCTAGT
AGCAGTTTCCACTCCACGGTTACCTTTTTAGTTTCATAGTATCTTTTCACAAAGTATTACAAATAAGCTAGAT
TCTCCCAGTTTGGGAATGCAAGTTTGCTACATTTTTAGCCTGGCAATATTTGTGTAGGTATTGCCTTATTGGA
AATTCTGGAAACCTGATACTGCAACCTGCAATGTAGGATGTTTGTATGGCATTTAAAGGTAATGGTGATGTTT
ATTATTCTATACTTTGCATTCTGTGAGAGTAATTTTCACTCTGTCTTAAGTGTGAGTAAGCCTCTTCTAAAAA
TCTTGTTCTTGCCAAGAAATTTATAAATCACATACGAAGACGTCTGTTGCTAACAGTTAACTTTATGAGGTAA
CTATATCCTTCTATTTCTCTGGACTCATTTTTAAAAAATATGCCGAATACTGCATACTGTTTAAGGTAGTATA
TAAGTTTATGAGAGAAGTGGAGAGCTTTCTTCCTTGAAAAGTCGGTATTTGTTGAGATACCATTTGCCTCACA
GAGAGGTGTTCCCCACTCCCATCCCCATTGCCAGATAATAAATATTTTGAGAAAAGTGACCTAAAACAGCTGA
AATCTTAGGTGCATCTGTCTGCAGACCTCCTTAAGCAGGCTGTATCTTACAATTCCCTTACTGCACTGGGTAA
GTGTTAACTTAGTTTTTGTTGTTTGCTCTTTTGCTTTAAATATTCTCCAAATTACCATTTATGCAACATGGTT
AGGGTTAATACTGCATGGTATTCATTTATCTTGTTTCATGAACTTTCCAGTACTGTACAAGGTCAACAAAGTA
ATGCCTGTGGTATCCTCATCTCTCACTTTTTTACTCTGTGATTTTAGCACAGTAAGGTACTGCAAAGACCTTC
CTTCCAAATGTTCTCCTTGACTTTATTTCTTGGGCCAATTCAGTATCCTCAACATCCTAAGATTTTGTTGTTT
TATCACTGACCTGTGGTTGGCCTGTTTTATTCTAATTTCCAGAAAAGTCAAGTCCCAGTATTTGCAATATCAA
ATAACTCTAAAACCGATGTGTGATTCTACCTTCCTTACTATTTTTACTGGGCAAATGCCCTATTTTTTTAATT
ATTATTATTTTTAACTTTTGGGACACACAAAAATCAGCAATTCTCATGAAGCGTTTGTTAGTGTGGCAGACTT
GTCTAATTCCTGAAACTCATTCATCCCCTTGAGCCAGCCAATGGGGAGGAATAGGATAATGCAAACACATGTT
TTGTTTTCTCATTTTCAAATAATTTACCATGTTAAAATAAACTTTTCTTTGTTTTTTATTTGTAGAGTCAGCT
AAGTACCCATATTTAAATGCCGTCTTTATTATTTTTTTGAGGTCTTTGTTTTTGTCTGTTTTTGTTTTGTTTT
GTTTTGTAAATAAGGTAACTGGGCAATCAAACACCTTTTGGGGATTCTGGCTTTAGTATTTTATCAGCCATTT
TAAAATTAAATATAAAAATCCTTTGTAAGAAACTTGCATCCTAATTTTTCTTTATTGCAATTGAAAGTGTAAA
TAATAAGACAATGTAAGTAAGACCTTCCTAATGTCTAATACAAACTGGGCTCCAGCAAGTGGCCCTATTTTTA
TTAGGGTTTTGAAGGTTTGTGTGTGTGTGTGCGTGCGTGTGTGTGTTTTTCTTTTTTAAATGTATAGTAGAGT
GGTGTCTGTATAAGTGTTACCTGTAGTGGGGTTTTGTCCAGCAAGCCTGAAATTTATACTTTGAAATAAAACT
ACTGGGTTTTTAAC
(SEQ ID NO: 123)
MDSLEEPQKKVFKARKTMRVSDRQQLEAVYKVKEELLKTDVKLLNGNHENGDLDPTSPLENMDYIKDKEEVNG
IEEICFDPEGSKAEWKETPCILSVNVKNKQDDDLNCEPLSPHNITPEPVSKLPAEPVSGDPAPGDLDAGDPAS
GVLASGDSTSGDPTSSEPSSSDAASGDATSGDAPSGDVSPGDATSGDATADDLSSGDPTSSDPIPGEPVPVEP
ISGDCAADDIASSEITSVDLASGAPASTDPASDDLASGDLSSSELASDDLATGELASDELTSESTFDRTFEPK
SVPVCEPVPEIDNIEPSSNKDDDFLEKNGADEKLEQIQSKDSLDEKNKADNNIDANEETLETDDTTICSDRPP
ENEKKVEEDIITELALGEDAISSSMEIDQGEKNEDETSADLVETINENVIEDNKSENILENTDSMETDEIIPI
LEKLAPSEDELTCFSKTSLLPIDETNPDLEEKMESSFGSPSKQESSESLPKEAFLVLSDEEDISGEKDESEVI
SQNETCSPEVESNEKDNKPEEEEQVIHEDDERPSEKNEFSRRKRSKSEDMDNVQSKRRRYMEEEYEAEFQVKI
TAKGDINQKLQKVIQWLLEEKLCALQCAVFDKTLAELKTRVEKIECNKRHKTVLTELQAKIARLTKRFEAAKE
DLKKRHEHPPNPPVSPGKTVNDVNSNNNMSYRNAGTVRQMLESKRNVSESAPPSFQTPVNTVSSTNLVTPPAV
VSSQPKLQTPVTSGSLTATSVLPAPNTATVVATTQVPSGNPQPTISLQPLPVILHVPVAVSSQPQLLQSHPGT
LVTNQPSGNVEFISVQSPPTVSGLTKNPVSLPSLPNPTKPNNVPSVPSPSIQRNPTASAAPLGTTLAVQAVPT
AHSIVQATRTSLPTVGPSGLYSPSTNRGPIQMKIPISAFSTSSAAEQNSNTTPRIENQTNKTIDASVSKKAAD
STSQCGKATGSDSSGVIDLTMDDEESGASQDPKKLNHTPVSTMSSSQPVSRPLQPIQPAPPLQPSGVPTSGPS
QTTIHLLPTAPTTVNVTHRPVTQVTTRLPVPRAPANHQVVYTTLPAPPAQAPLRGTVMQAPAVRQVNPQNSVT
VRVPQTTTYVVNNGLTLGSTGPQLTVHHRPPQVHTEPPRPVHPAPLPEAPQPQRLPPEAASTSLPQKPHLKLA
RVQSQNGIVLSWSVLEVDRSCATVDSYHLYAYHEEPSATVPSQWKKIGEVKALPLPMACTLTQFVSGSKYYFA
VRAKDIYGRFGPFCDPQSTDVISSTQSS

[0122] An amino acid sequence for the protein encoded by the ATF7IP2 gene that is a regulator of T cell exhaustion/dysfunction resistance is available from the UniPROT database at accession no. Q5U623, cDNA NM_001256160, with gene location at Chr 16: 10326434-10483638.

(SEQ ID NO: 124)
AGCATTGTTAACGGCTGCGGTTCGAAGTGGCTGTGGGTATTGCTGCGGCTGGTGCGTCGTCGCTCTAGGTTTT
CTTCCGCCGTCTGTGACAGCTTCTTGATCTGTCCCCAGGAATCCTGCTTTTTTTTTTTCTTTGAGACACGGTC
TCACTCTGTCACCCTTGCTGGAGTGCAGTGGTGCAATCACAGATCACGGCAGTGTCTAATTCCTGGGCTCAAG
TGAACCTTTTGCATCAGCCTCCTGAATAGCTGAGACCACAGGATATGAAAGATGGCAAGTCCAGATAGAAGTA
AACGGAAGATATTAAAAGCCAAAAAGACAATGCCCCTAAGTTGCCGGAAGCAAGTAGAGATGCTGAATAAGTC
AAGGAATGTTGAAGCGCTGAAAACAGCAATTGGGAGTAATGTTCCAAGCGGTAATCAGAGTTTCAGTCCTAGT
GTCATAACTAGGACGACTGAAATAACCAAATGTAGCCCTTCTGAAAATGGTGCATCCTCATTGGACTCTAATA
AAAATTCAATATCAGAGAAAAGTAAAGTATTCTCTCAGAATTGCATAAAACCAGTAGAAGAAATTGTTCATTC
AGAAACAAAATTGGAACAAGTTGTTTGTTCGTACCAAAAGCCAAGTAGAACAACAGAATCCCCCAGCAGAGTC
TTCACAGAAGAGGCAAAAGATTCACTGAACACTTCTGAAAACGATTCTGAGCATCAGACAAATGTAACAAGAT
CCCTTTTTGAGCATGAGGGGGCTTGTAGTCTAAAGTCCAGTTGCTGTCCACCCAGTGTATTGAGTGGTGTTGT
TCAGATGCCAGAGTCTACAGTAACCAGTACCGTGGGTGACAAGAAAACTGACCAGATGGTTTTCCATTTAGAA
ACAAACTCCAATTCAGAATCACATGATAAAAGGCAAAGTGACAACATTTTATGTTCAGAAGACTCAGGTTTTG
TGCCTGTTGAGAAAACACCTAATTTGGTGAATTCAGTCACTTCTAACAACTGTGCTGATGACATTTTGAAAAC
TGATGAGTGTAGTAGAACCAGTATTTCAAATTGTGAAAGTGCAGACTCAACATGGCAGTCATCACTTGACACT
AATAACAACAGCCATTATCAAAAGAAGAGGATGTTTTCAGAAAACGAGGAAAATGTTAAACGCATGAAAACTT
CAGAGCAAATTAATGAAAATATTTGTGTAAGTTTGGAAAGGCAAACAGCATTCCTGGAACAGGTCAGACATTT
GATTCAGCAGGAGATCTATAGCATAAATTATGAACTATTTGATAAGAAACTGAAAGAATTGAACCAACGCATT
GGGAAGACAGAGTGCAGAAATAAGCATGAAGGAATAGCTGATAAACTTTTGGCAAAAATAGCAAAACTTCAAA
GACGTATTAAAACAGTATTATTATTTCAAAGGAATTGTTTGAAACCAAACATGTTATCCAGTAATGGAGCCTC
TAAGGTTGCAAATTCAGAGGCTATGATTTTGGATAAGAATCTTGAGTCAGTTAATAGTCCAATTGAAAAGTCT
TCTGTGAATTATGAGCCTTCTAACCCTTCCGAAAAAGGAAGTAAAAAAATTAATTTGTCATCAGATCAAAATA
AGTCTGTTTCTGAAAGTAACAATGATGATGTTATGTTGATTTCTGTGGAAAGTCCTAATTTGACAACTCCAAT
TACATCAAATCCAACAGATACCAGAAAAATTACATCAGGAAATTCTAGCAATTCTCCCAATGCTGAAGTTATG
AAAGTCCAGTATCCCCCCTGGAGTCACATTCGAAAGCTGCTTCAAACTCAAAGGAAACAACCCCATTGGCACA
AAATGCAGTCCAGGTTCCTGAGTCCTTTGAGCACCTGCCACCTCTCCCAGAACCACCAGCACCACTACCTGAA
TTAGTAGACAAAACCCGAGACACACTTCCTCCCCAGAAGCCTGAGCTCAAAGTGAAACGGGTTTTCAGACCCA
ATGGCATTGCCCTGACTTGGAATATAACCAAAATCAATCCCAAGTGTGCTCCTGTAGAAAGCTACCACCTCTT
CCTGTGTCATGAGAACTCTAATAATAAGTTGATTTGGAAGAAGATTGGAGAAATTAAAGCTTTACCACTCCCC
ATGGCCTGTACTTTATCTCAGTTTTTAGCTTCCAACAGATACTATTTTACTGTCCAATCAAAAGATATTTTTG
GACGATATGGACCATTCTGTGATATAAAATCTATCCCTGGGTTTTCTGAAAATCTTACGTAAAAGGTGTTTAA
TAATGATATACTACTTTTTTTTTCATATTTGTTTGTTTGCAATGTTACTGTAATACTATTTGCCATTGTAAAA
GGCCAGCTCAGATTGTGAGCCCTTTCTATTGGGACAGTCCTCTTCTATATGTTTTAAGTGGCCAGTAATTTAA
TGAATTTCTGGTTTGTATTAAATATGTCCTTCCAATGGATAAGTTCTAAAACATACGCTATCATTGGCCCATG
TTGCTGAGGTGCATTGTGAACAATACCTTTAGTGACTGTGGAACTGCTGCTTCTATCAGAAGACCTAGGATAC
AAGCAGCCACTGTTTCCTCCGTTAACAATCAGCTTTTAGTAACCTGCTGTGGTCAGCATAGCTACAGGAAAAG
TCAGCCCTTGACTGAGGGCCAGATCATCCCTGGAGTGCACCTCTACTAAGATTTTATGAAAAGATGACATGTT
GGGCTGCATGATAAAAGTTAATTATAAAAATTAAAAGATTTTTTTTTTTGAGATGGAATATTGCTCTGTTGCC
CAGGCTGGAGTACAGTGGTCACTGCAACCTCCATCTCCCTGGTTCAAGCAATTCTCCTATGTCAGCCTCCCAA
GTAGCTGGGACTATAGTCACTTGCCACCATGCCCGGCTAATTTATTTTTAGTAGAGATGAGGTTTCACCTTGT
TGGTCAGGCTGGTCTCAAACTCCTGACCTCAGGGGATCCACCCGCCTCGGCCTCCCGAAGTGCTGGGATTATA
GGCGTAAGCCACCATGCCTGGCCAAAAATTAAAAGATTTTATGAAACGAAATGGCTTCCCATTCTTTCTATTC
AGCTTCTAAGTGGGCTATTCATTTGTGCTCTCCTCTTTTTTGTTTTGTTTTGCACTTTGTCAATCATTTGGGG
AAATAGCCTGGAGGTCTTTCCTGAATCTGTTTGTAGACATAATAAAATTTGTGTGCTGTGTACACAAAAACAT
AATGTATCTTATGAAAGCATTACCCAACCTGTTTGAGTTGAGAATGCATTTGTCCACCTTTGATTTGAGGCTT
TAGTTTGCTGATTTCCTAAATGCTACCCTTTGATCATTTCCTGGCCACCATCACAATACTAAGGGGCTCAGAT
GTGTCTTGTGCCCACCTCTTCCTGAGAAGAGATGGAAGTGGAGCTGTGACTAGTACAAGCAGCCCAAGAAACT
CTGAACGGGGCCCAATGGAGGCAAACTTGAGCAAATAATTGGGATGATAAGAAACAAAAATAATCCCAACTGT
TTGAAAGTTCGAAAGAGGGGCATTCTTTTCTGGTACATGGTGAGAGTTCAGGCTCCAGAGACTCAAAACGGAA
TGGTTTTCCTTGGCATTTTGTAAATGCTCTCACATCTGTAGCAATAAAGCTGTTATTTTCTGCA
(SEQ ID NO: 125)
MASPDRSKRKILKAKKTMPLSCRKQVEMLNKSRNVEALKTAIGSNVPSGNQSFSPSVITRTTEITKCSPSENG
ASSLDSNKNSISEKSKVFSQNCIKPVEEIVHSETKLEQVVCSYQKPSRTTESPSRVFTEEAKDSLNTSENDSE
HQTNVTRSLFEHEGACSLKSSCCPPSVLSGVVQMPESTVTSTVGDKKTDQMVFHLETNSNSESHDKRQSDNIL
CSEDSGFVPVEKTPNLVNSVTSNNCADDILKTDECSRTSISNCESADSTWQSSLDTNNNSHYQKKRMFSENEE
NVKRMKTSEQINENICVSLERQTAFLEQVRHLIQQEIYSINYELFDKKLKELNQRIGKTECRNKHEGIADKLL
AKIAKLQRRIKTVLLFQRNCLKPNMLSSNGASKVANSEAMILDKNLESVNSPIEKSSVNYEPSNPSEKGSKKI
NLSSDQNKSVSESNNDDVMLISVESPNLTTPITSNPTDTRKITSGNSSNSPNAEVMKVQYPPWSHIRKLLQTQ
RKQPHWHKMQSRFLSPLSTCHLSQNHQHHYLN

[0123] An amino acid sequence for the protein encoded by the ATXN7L3 gene that is a regulator of T cell exhaustion/dysfunction resistance is available from the UniPROT database at accession no. Q14CW9, cDNA NM 001382308, with gene location at Chr 17: 44191805-44200113.

(SEQ ID NO: 126)
ATGAAAATGGAGGAAATGTCTTTGTCTGGCCTGGATAACAGCAAACTAGAGGCCATCGCTCAGGAGATATACG
CGGACCTGGTCGAGGATTCTTGTTTGGGATTCTGCTTTGAGGTACACCGGGCTGTCAAGTGTGGCTACTTCTT
CTTGGACGACACGGACCCTGATAGCATGAAGGATTTTGAGATCGTGGACCAGCCGGGCTTGGACATCTTTGGA
CAGGTTTTCAACCAGTGGAAGAGCAAGGAGTGTGTTTGCCCCAATTGCAGTCGCAGCATTGCCGCCTCCCGCT
TTGCTCCCCATCTGGAGAAGTGCCTGGGAATGGGTCGGAACAGCAGCCGAATCGCCAACCGCCGGATTGCCAA
TAGCAACAATATGAATAAGTCTGAGAGTGACCAAGAAGATAATGATGACATCAATGACAACGACTGGTCCTAT
GGCTCGGAGAAGAAAGCCAAGAAGAGAAAGTCAGACAAGCTATGGTATCTCCCATTCCAGAACCCCAATTCCC
CTCGAAGATCCAAGTCATTAAAACACAAAAATGGGGAACTTAGCAATTCGGATCCTTTTAAGTATAACAATTC
AACTGGGATCAGCTATGAGACCCTGGGGCCGGAGGAGCTTCGCAGCCTGCTAACCACGCAATGTGGGGTGATT
TCTGAACACACCAAGAAGATGTGCACAAGGTCCCTGCGCTGCCCACAGCACACAGATGAGCAGAGGCGAACCG
TACGGATTTATTTTCTCGGGCCCTCGGCTGTCCTTCCAGAGGTCGAGAGCTCCCTGGATAATGACAGCTTTGA
CATGACTGACAGCCAGGCCCTGATCAGCCGGCTTCAGTGGGACGGCTCCTCTGACCTCTCACCCTCTGATTCA
GGCTCCTCCAAGACGAGTGAAAATCAGGGATGGGGTCTAGGTACCAACAGCTCTGAGTCACGGAAAACCAAGA
AAAAGAAATCCCATCTGAGCCTGGTAGGGACTGCCTCCGGCCTAGGTTCCAACAAGAAGAAGAAGCCAAAGCC
ACCGGCACCCCCGACGCCCAGCATCTATGATGACATCAACTGACTTGGGTGCAAGGGATAGCCTTTGGCTGAG
CAGAGCCCTCTCTCCTGACCCCCACCCAGGTGGCATAGCCTGGCAAATGGACGGCTGCTGGGGGTTGGGGCTT
GGGAAGCTTGGTGGGCCAGGCAGGCAGAGGATCCGATTATGCGCCCCTGGGGGGTGTCAAAGTCCTCTGCAAT
GGAGCACGACTCCTCGGCGTGCAGGACTCAGACCTGGACATATTATGCCTTGGACATAAGTTTGGTGGGGAGG
CGGTTTTCCTATTTATTCTGTGAGTTACTGGATGTCCAGCTAGGCCAGGGGCCTGACCTGGGCACTGTGCCAG
GGCACTGCCTGCCCCCCACCCCAGGAACTGGACTAAGCCCTGCTGAGGGGCAATGTGGCGACCCGGGAGGCTG
TGGGTTGGAAGCTGAGCCTGGAGGGGGCCTGCCTCGGCCGCCCTCAGCAATGTGAATGGGTCCGGTGCTTGGA
GCTGAGGGGCAAGGCTGGGCATGTCCTGTCTGTGTGCAGAATCTTATCAAATGCCCCCAGTCCCAGGGGTAGG
CAGGCACAGAGTGCTGTCTGCTGAGGTGGGCGTCCAGAACTGCCGCCACCTTCCCTGCCCCTCACAGGGGCAG
CCCTTTCCCCTCAGTCCCCATGGGCCTCCTTGGCAGCAGGAGCTGTCCTTTTGTTGGGTGCCAGGAAAGGGCC
TCCAGCCTCTACAGCTTCAAGGAATGGGAAAGGGAGGGTAGGAAGAGGGAGAAGTGTCAGAATTCCTCCCCCT
GCCTCTCCTCCCTGACCCAGGGCTGGTGAGGAGTGGGGCCCCAAGGTGAGAGGGAACGGTGCTGCTTTATTTG
AAATGTTTTCTTACCTCATTCCCTGCCCCAGGAAGGGACCCAGCCTCACCCTCCTGGGGTGGCCCCGTGTTCC
TCCTGCCCACCCTGCCCCACTGCCCTACCGGGGCAGCCCAGGTTCCCAACTGCTGCTTCCACCCCCTTCACCT
TGACTGGCTTCAGTTCCTCTCAGCGCTCCTGCCTCCAAAGCGTGCCCTGTTTCCCTTCCTTAGCGCTTTTAAG
TTATTTATTCTGTACTTGTGGTTTGGGGCTCTGAGGAAAATCCTAATCTTGTGCCTCTCCCCCTTTGCTAGGA
GTTGGGTGGGAAGAGAGGGTGGCCTCTGTGCCCCAGGTTGTCAGTGGAGGGGAAGGGGTGTCACTGCCCCTCT
GTGGGACTGTCATGCCAGTGTGCCCACCTGCCTGGTCTACATCCTAAAGAGATGTACCGTCCCCCCTCCATGC
GGGCACCACCACTCCCAGGAGCCAAGCTGGAGGACCGCGACCTGGGCTGGGAGCAGAGCTGACTGACATGGGT
GGAGGTGACCCTGAGCCAAGTTCTCTGGCACTTGCTGGACATGTCCCCTACCCTCTTCCCAAGAGGAGCCATC
CCACATTTGGGTAGTTAGTACCCAGGACTGGTTGGACTGATCGGGTTAGGGACCCTAGAGGGTTAAGGGAACA
ACAGAGATGGGGCTGCAATGCCCTGTCTGGAACTCCGCTCTCCCGCTGGGGTGGTTCTGATTGTGGCTCATGC
CTGGTTGCAAATTGGTTTTTAACCCACAAATTGTGATTATTTTTTAAAAAGCCAAACAGATTTTGGCAGGAGT
TAGAATAAATCCCGGGGCCTGGGCTTCTCTATTCTTGGCCCTCCGTAGTCTCCCTCCGAGAGGAGGCCAGAGG
GAGAGGAGGATCTCAGCAGGCCTCTAGCCGCTTCCAGATGCAGTCTGGGGAGTGGGCTGAAGGTGAAGGGAGG
AAGGCTGTGGGCCACTCTCCCTTCTGAGAGGCAGCTGCAGCTCAGGCCCTAATACACTCTTTGCCCTGTGGCC
TCTCCCTTTTCCCCCCTTCTGGTTGGAGGAGGGAGAAGTGGGAAGTAGCTTGGGAACTGGTTTGTCCACATAA
ACTTCCCCATTGTTCCTTGGCCCGCCCTCAGGGCAGAGCCCCCTGCCCAGGCTGGGTAAGAGATGGGCTTGGT
CCAGCAGGGACCCTGAGGGAACAAACCCTTTTCCTTCTGGGGAGAGAGTGCCCCCCCTACCATGTAGTTGAAC
AGGGGCTAGGAGCTCCCCACTCCCCTCCCTCTAACAGCAGGCTGTGTGGGTTTCAATTCCCATCCTTCCCACC
CCGGCTAGGTGTCGTCCACCCTGTATCCTGTGTCTGAGTGTGTGTGGGGGGGTTCTGTACTAATTTCCATGGC
CGGTGGCTTTTCCTTCCATGCATCACTCCCCCCCGCATGCCCAGGGGCCACCCGCCTGGCATTACCGCATGCT
GGGGTCATTGGGGGAGGGGGGTGGGGCTCACGCTGTCCTGTGGTCTTGAGATTTTTATTTTTGCATATGTAAT
CCATTCTGTACAGGTAGCTAACTTTGTAAACGCTGTGTATTCCCTCTGCCCCCATGGCTGCTGGTGTAAATAA
ACTGCATCTCCCGTTGGTA
(SEQ ID NO: 127)
MKMEEMSLSGLDNSKLEAIAQEIYADLVEDSCLGFCFEVHRAVKCGYFFLDDTDPDSMKDFEIVDQPGLDIFG
QVFNQWKSKECVCPNCSRSIAASRFAPHLEKCLGMGRNSSRIANRRIANSNNMNKSESDQEDNDDINDNDWSY
GSEKKAKKRKSDKLWYLPFQNPNSPRRSKSLKHKNGELSNSDPFKYNNSTGISYETLGPEELRSLLTTQCGVI
SEHTKKMCTRSLRCPQHTDEQRRTVRIYFLGPSAVLPEVESSLDNDSFDMTDSQALISRLQWDGSSDLSPSDS
GSSKTSENQGWGLGTNSSESRKTKKKKSHLSLVGTASGLGSNKKKKPKPPAPPTPSIYDDIN

[0124] An amino acid sequence for the protein encoded by the BORCS8 gene that is a regulator of T cell exhaustion/dysfunction resistance is available from the UniPROT database at accession no. Q96FH0, cDNA NM_001145783, with gene location at Chr 19: 19176903-19192591.

(SEQ ID NO: 128)
ACGCGGGGCGTCTGGAACTTAAAGGGGCAGCGTACCTTGGCCGTCCCGTT
CCACAACAAGGTCCCTTCTGCGGTCTCAAAGGCTTATAAGCAAGGGCGGG
GGCAGAGGGCTAAAGAAGGGAGTTTTTGCGGCCCGAGTGGGTAATGCGTG
GAGGACTCCCCCAACTCGTCTCTCAAGGAAAAGGGGGTTCAGAAAGGGAG
AGAGTTCTTCCCCCTCTCCTGCCTGGGTGTCGCTCCACCAGCCTCCTGGC
CGTCGCGCCCCCTCCTCACTGCGCCACCCCCGGGTGTGCCTCCTTCCCTG
CGTCTCACACAGCCCCTTTCTTGTCCGCAAAGACTGAGGAGCGGGGAGGG
CGGGCCCTCTGACACCGGAACAGGAGCCGTGCGGCGTCCGGTTTCAGCAG
GGAAGGCTTAGGCGGGCGTCCCAACCTCCGGGCTTCCGGTGCCGTTTCCC
GGTTCGCTCGGCCGCGGTCGCTATGGAGGAGCCGGAGATGCAGCTCAAGG
GGAAGAAAGTCACGGACAAGTTCACTGAGAGCGTCTACGTCCTGGCCAAC
GAGCCATCCGTGGCCCTGTACCGGCTGCAGGAGCATGTGCGTCGCTCCCT
CCCCGAGCTGGCCCAGCACAAGGCAGACATGCAGCGTTGGGAGGAGCAGA
GCCAGGGAGCCATCTACACTGTGGAGTACGCCTGCAGCGCCGTGAAGAAC
CTGGTGGACAGCAGCGTCTACTTCCGCAGCGTGGAGGGTCTGCTCAAACA
GGCCATCAGCATCCGGGACCATATGAATGCCAGTGCCCAGGGCCACAGGT
AGCTCCTGGGACCGCCCGCCCCCACTGCCACTCCCAGCTGCAAGGACCGT
CTCTCAGCTGCGCTGGGAACCGCTGCTTCTCGCTTATTAGAAAACTGTCT
CTTTCCTTTTGTCCTGGTGTCTGGTGACCTCCTCTTGTCCTGTGGCATCT
ATAACCTGAGTTCAGTCACTTAATACCGAGGTCCTGCGCTCTGCTGTGTG
CCTGGCCCTGGGCTGGGCACTGGGGACATAGCAGTGACCGAGACAGACAG
GCTCACAAGGAGACATACGACAACCAGGTAAACATGGCAGACAAGAGCAT
GTCAGATGCGCTGTGAAGAACACTGCGGGGCCCCTCCTAGGAGGTGGCAT
GAGTTACATGCAGACAGAGACGATCCGGGGGCAGACGGAGTTCCATGTGG
GGCAGTGGTGAGGGCAGACGCTCTGGGGCTGGGATCCCTGGGAGTGTTCG
AGAAGCACCGAGAAGGCTTCTGTGGCTGGAGCCGGCCAGCTGGGGGAGAT
GGGGCCAGGGAGATGGCAGGGGCCTCTCCCTGTCCCAGGACCCAGAGCCA
AGGGAGGCTTTAAGCCCAGGACCAGGGGTCTGAAAACGAAAAGCACTCAC
AGTCCTTGAACATTGGAAAGAGAATTTTTGAAGAGTAGCCCTTCTTTTTG
TTTTTGTTGGCATTCTAAGTTAATAAACACGCTTATGAA
(SEQ ID NO: 129)
MEEPEMQLKGKKVTDKFTESVYVLANEPSVALYRLQEHVRRSLPELAQHK
ADMQRWEEQSQGAIYTVEYACSAVKNLVDSSVYFRSVEGLLKQAISIRDH
MNASAQGHR

[0125] An amino acid sequence for the protein encoded by the CAND1 gene that is a regulator of T cell exhaustion/dysfunction resistance is available from the UniPROT database at accession no. Q86VP6, cDNA NM_001329674, with gene location at Chr 12: 67269358-67319953.

(SEQ ID NO: 130)
CTTTTGCCCTAGGGAGCGAGTGCGGAGCGAGTGGGAGCGAGACGGCCCTGAGTGGAAGTGTCTGGCTCCCCGT
AGAGGCCCTTCTGTACGCCCCGCCGCCCATGAGCTCGTTCTCACGCGAACAGCGCCGTCGTTAGGCTGGCTCT
GTAGCCTCGGCTTACCCCGGGACAGGCCCACGCCTCGCCAGGGAGGGGGCAGCCCGTCGAGGCGCCTCCCTAG
TCAGCGTCGGCGTCGCGCTGCGACCCTGGAAGCGGGAGCCGCCGCGAGCGAGAGGAGGAGCTCCAGTGGCGGC
GGCGGCGGCGGCAGCGGCAGCGGGCAGCAGCTCCAGCAGCGCCAGCAGGCGGGATCGAGGCCGTCAACATGGC
GAGCGCCTCGTACCACATTTCCAATTTGCTGGAAAAAATGACATCCAGCGACAAGGACTTTAGGTTTATGGCT
ACAAATGATTTGATGACGGAACTGCAGAAAGATTCCATCAAGTTGGATGATGATAGTGAAAGGAAAGTAGTGA
AAATGATTTTGAAGTTATTGGAAGATAAAAATGGAGAGGTACAGAATTTAGCTGTCAAATGTCTTGGTCCTTT
AGTGAGTAAAGTGAAAGAATACCAAGTAGAGACAATTGTAGATACCCTCTGCACTAACATGCTTTCTGATAAA
GAACAACTTCGAGACATTTCAAGTATTGGTCTTAAAACAGTAATTGGAGAACTTCCTCCAGCTTCCAGTGGCT
CTGCATTAGCTGCTAATGTATGTAAAAAGATTACTGGACGTCTTACAAGTGCAATAGCAAAACAGGAAGATGT
CTCTGTTCAGCTAGAAGCCTTGGATATTATGGCTGATATGTTGAGCAGGCAAGGAGGACTTCTTGTTAATTTC
CATCCTTCAATTCTGACCTGTCTACTTCCCCAGTTGACCAGCCCTAGACTTGCAGTGAGGAAAAGAACCATTA
TCGCTCTTGGCCATCTGGTTATGAGCTGTGGAAATATAGTTTTTGTAGATCTTATTGAACATCTGTTGTCAGA
GTTGTCCAAAAATGATTCTATGTCAACAACAAGAACCTACATACAATGTATTGCTGCTATTAGTAGGCAAGCT
GGTCATAGAATAGGTGAATACCTTGAGAAGATAATTCCTTTGGTGGTAAAATTTTGCAATGTAGATGATGATG
AATTAAGAGAGTACTGTATTCAAGCCTTTGAATCATTTGTAAGAAGATGTCCTAAGGAAGTATATCCTCATGT
TTCTACCATTATAAATATTTGTCTTAAATATCTTACCTATGATCCAAATTATAATTACGATGATGAAGATGAA
GATGAAAATGCAATGGATGCTGATGGTGGTGATGATGATGATCAAGGGAGTGATGATGAATACAGTGATGATG
ATGACATGAGTTGGAAAGTGAGACGTGCAGCTGCGAAGTGCTTGGATGCTGTAGTTAGCACAAGGCATGAAAT
GCTTCCAGAATTCTACAAGACCGTCTCTCCTGCACTAATATCCAGATTTAAAGAGCGTGAAGAGAATGTAAAG
GCAGATGTTTTTCACGCATACCTTTCTCTTTTGAAGCAAACTCGTCCTGTACAAAGTTGGCTATGTGACCCTG
ATGCAATGGAGCAGGGAGAAACACCTTTAACAATGCTTCAGAGTCAGGTTCCCAACATTGTTAAAGCTCTTCA
CAAACAGATGAAAGAAAAAAGTGTGAAGACCCGACAGTGTTGTTTTAACATGTTAACTGAGCTGGTAAATGTA
TTACCTGGGGCCCTAACTCAACACATTCCTGTACTTGTACCAGGAATCATTTTCTCACTGAATGATAAATCAA
GCTCATCGAATTTGAAGATCGATGCTTTGTCATGTCTATACGTAATCCTCTGTAACCATTCTCCTCAAGTCTT
CCATCCTCACGTTCAGGCTTTGGTTCCTCCAGTGGTGGCTTGTGTTGGAGACCCATTTTACAAAATTACATCT
GAAGCACTTCTTGTTACTCAACAGCTTGTCAAAGTAATTCGTCCTTTAGATCAGCCTTCCTCGTTTGATGCAA
CTCCTTATATCAAAGATCTATTTACCTGTACCATTAAGAGATTAAAAGCAGCTGACATTGATCAGGAAGTCAA
GGAAAGGGCTATTTCCTGTATGGGACAAATTATTTGCAACCTTGGAGACAATTTGGGTTCTGACTTGCCTAAT
ACACTTCAGATTTTCTTGGAGAGACTAAAGAATGAAATTACCAGGTTAACTACAGTAAAGGCATTGACACTGA
TTGCTGGGTCACCTTTGAAGATAGATTTGAGGCCTGTTCTGGGAGAAGGGGTTCCTATCCTTGCTTCATTTCT
TAGAAAAAACCAGAGAGCTTTGAAACTGGGTACTCTTTCTGCCCTTGATATTCTAATAAAAAACTATAGTGAC
AGCTTGACAGCTGCCATGATTGATGCAGTTCTAGATGAGCTCCCACCTCTTATCAGCGAAAGTGATATGCATG
TTTCACAAATGGCCATCAGTTTTCTTACCACTTTGGCAAAAGTATATCCCTCCTCCCTTTCAAAGATAAGTGG
ATCCATTCTCAATGAACTTATTGGACTTGTGAGATCACCCTTATTGCAGGGGGGAGCTCTTAGTGCCATGCTA
GACTTTTTCCAAGCTCTGGTTGTCACTGGAACAAATAATTTAGGATACATGGATTTGTTGCGCATGCTGACTG
GTCCAGTTTACTCTCAGAGCACAGCTCTTACTCATAAGCAGTCTTATTATTCCATTGCCAAATGTGTAGCTGC
CCTTACTCGAGCATGCCCTAAAGAGGGACCAGCTGTAGTAGGTCAGTTTATTCAAGATGTCAAGAACTCAAGG
TCTACAGATTCCATTCGTCTCTTAGCTCTACTTTCTCTTGGAGAAGTTGGGCATCATATTGACTTAAGTGGAC
AGTTGGAACTAAAATCTGTAATACTAGAAGCTTTCTCATCTCCTAGTGAAGAAGTCAAATCAGCTGCATCCTA
TGCATTAGGCAGCATTAGTGTGGGCAACCTTCCTGAATATCTGCCGTTTGTCCTGCAAGAAATAACTAGTCAA
CCCAAAAGGCAGTATCTTTTACTTCATTCCTTGAAGGAAATTATTAGCTCTGCATCAGTGGTGGGCCTTAAAC
CATATGTTGAAAACATCTGGGCCTTATTACTAAAGCACTGTGAGTGTGCAGAGGAAGGAACCAGAAATGTTGT
TGCTGAATGTCTAGGAAAACTCACTCTAATTGATCCAGAAACTCTCCTTCCACGGCTTAAGGGGTACTTGATA
TCAGGCTCATCATATGCCCGAAGCTCAGTGGTTACGGCTGTGAAATTTACAATTTCTGACCATCCACAACCTA
TTGATCCACTGTTAAAGAACTGCATAGGTGATTTCCTAAAAACTTTGGAAGACCCAGATTTGAATGTGAGAAG
AGTAGCCTTGGTCACATTTAATTCAGCAGCACATAACAAGCCATCATTAATAAGGGATCTATTGGATACTGTT
CTTCCACATCTTTACAATGAAACAAAAGTTAGAAAGGAGCTTATAAGAGAGGTAGAAATGGGTCCATTTAAAC
ATACGGTTGATGATGGTCTGGATATTAGAAAGGCAGCATTTGAGTGTATGTACACACTTCTAGACAGTTGTCT
TGATAGACTTGATATCTTTGAATTTCTAAATCATGTTGAAGATGGTTTGAAGGACCATTATGATATTAAGATG
CTGACATTTTTAATGTTGGTGAGACTGTCTACCCTTTGTCCAAGTGCAGTACTGCAGAGGTTGGACCGACTTG
TTGAGCCATTACGTGCAACATGTACAACTAAGGTAAAGGCAAACTCAGTAAAGCAGGAGTTTGAAAAACAAGA
TGAATTAAAGCGATCTGCCATGAGAGCAGTAGCAGCACTGCTAACCATTCCAGAAGCAGAGAAGAGTCCACTG
ATGAGTGAATTCCAGTCACAGATCAGTTCTAACCCTGAGCTGGCGGCTATCTTTGAAAGTATCCAGAAAGATT
CATCATCTACTAACTTGGAATCAATGGACACTAGTTAGATGTTTGTTCACCATGGGGACCATTACATATGACC
ATACAATGCACTGAATTGACAGGTTAATCATAAGACATGGAAAGAGAAGTGTCTAAAAGCTTCAAAATGTTCC
ACTTTTTTTTCCTTCATGGAGACTGTTTGTTTGGCTTTCTTCCATTGTTGTTTTTGTAGCATTTATTTCAGAA
ATGTGTATTTCCATAATCCAGAGGTTGTAAAACCACTAGTGTTTTAGTGGTTACAGCAACATTTGAAATGGAA
ACTAAAAGTTAGGATTTTATGGAGTATGGAGATAGGGTCCAGTATCTATTTACCCTGTAATGTTTAGGATTAA
AATGTTAAAATTTTGTGACCATGAATTTCTTTCTTTTATAAATTTTCTCATTTAAAAATCAAAAATCTTGCAA
AACAAAAACCATGTTTCTTTTTCTTGTATAACTTTTTGTTTTCAGCAACATAAATTGATTTTTAGCTGGCAGA
CAAGAATATCCATATAAGATTTGTTAACCATTTCAGAGAGTTTGGCAATTTTTAAAAGATAATAAGGTATCAT
TTTTAAGTATGAAAATTAACAATATCCCTGTTGCGCACACTAATTTTGCATGAGTAAGTTTACAAATATGTAT
CGTCTGTAAAGCAGCATGTGCAGATTATTCATAATATAGAAGTTAAAATAAGTATTAGTGCAATTTTCAGATA
TTTATTTTTGCACAGAAAACACATTATCTGGAGAGAAAGAAAGGAGAATTTTTGAGACTTGGGTTTTCTTAAT
GCCAGTGTGAATTTGCAGATGTTTTCAGAAAATCAAGTCACAGTAACAATTTGCCACTTTTTTCTATTATAAA
TCTTCTTACTTAAATTTTGAATATTTAGTTTTTCTCAGTTACCCATTTGTGTGTGTGTGATTCCACTTAGAAA
TTCTTAAAACCAGATTTTTCTTTCATTCCGTTTGGATGTCTACATTCCTTATCAAAGGATATAAATACTGTGT
ATGCTTTTGAATTTTATTTTTAGGAAAATTCTGAAGCCAGCTATCACAGGTTTGTTAGCTAATAATAGTATTT
TCTTTTAGTTGAGTTAGGTTTTTCCCCATCTCCTGTAGAGCGAATTTACATATTGTATTGGGTAAGTGTTCAC
TACTTTTCCTGATTAAGGGATCTGTGCTGGGGAACAAAGCTTTTGCAGTACCTTATATTGTAGTTAAAATTTT
ATTTAACATATCCTTCAGTGAGCTCATTTCACACTGTAGCCTCTTCCTTAAAATTTGTGGTGCTCCTGTAACA
GTAAGAACTAATTCTGAAATAAAAGACATCTCCTAATGCTGTGCAAACATAGTTTACATGTATTGAAGGAGGC
AGTTGTTAAATTGAGTGACCAATTTAAGCAATCAGATATTTGAAAACTGCACCCTTTAGTTTTGAAACTGTGA
ATTAGAAACACTTTTCCTGCTGTATTACTACCTGCTTTAACATCCAAATATACAGTGATTTTAAATGATAACA
TACTGTGGTTATTAGATTAACAGCTTGATTTTGAATGTTCAGATGATAATGCAGAAGACATCACTTCTAGTAA
GGATTTTGACTAGTGCATTGATGTTGAAGTTGGTGCCATTTCAAAATGTGGCAGGTGATAATCTTTTACCATA
ATTTGCATAAAACTGTAATAGAAGTTTATTTTGAGATGTTAGTATATTATGTACTATGCATTTCTGTGGTATA
GATGTTGTGGATATATTTAAGTATTTGGTTACATGGTTTTACAATAAATTACAATACTGCAGGCTCTAGGACT
GAACAGGAGACTGACATGCATATGTTGTGTGAATGTCTTAGTTGGGTAAAGTTAAATCCAAATACTTCAACTG
GCTTTTTCTTCAGTTTGTTTGTTTTTAACTTTCAAGATGCATGTTTTGTTTTGTTTTGCTTTGTTTTTGTCTC
TTAAGCCAATTCATTTTTCTAACAGTTGAAATTCTTTTAGTACTAAAGAAATAGATACTGCTCTTTTATGGCT
TTAGTGTTTATATACCTGTTTATATGCATACATTAACAAAATTAGTAACAGCAGTGCTTAGAATTTCAATGCT
GTGTCATACTGATGATTAACTCCATACTCCTAGTGGTGATGTGGTCCAGATACTGGAATGGAAGTGGCAGGAT
GTGGAGTCCAGACATAGTCTACCACTCATGCTACTTACTAGTAATATTAAGGTGTTAAACTTAGGAATTTGTC
ACATGTAGGTTCCTGAGGAGATCTAAAAGTTAATACAAAACCAAGCTGTTTACTGATTTTCATGAGAACATTT
AAGTTAGTTTAGGTCTACCTGATTTATTTTAAAAGAAGGCAGAGGGCTGGACGCAGTGGCTTACGCCTGTAAT
CCCAGCACTTTGGGAGGCCGAGGCGGGCGGATCACGAGGTCAGGAGATCGAGACTATCCTGGCTAACACTGTG
AAAACCCATCTCTACTGAAAATACAAAAAATTAGCTGGGCGTGGTGGCAGACGCCTGTAGTCCTAGCTGCTAC
AGCTGAGGCAGGAGAATGGCGTGAACCCAGGAGGCGGAGCTGGCAGTGAGCCGAGATCACGCCACTGCACTCT
GGCCTGGGCAACAGAGCGAGAGTCTGTCTCAAAAAAAAAAAAAAAAAAAAGGCAGGAAGGAAATTTGGTATGG
CAGGGCCTAACCTAAAAGGTTATTTATAAAATCAATAGCACTGAATGATAATTTTTTTAATGACAGTCATGTA
TTTTATTAATGATATCTGAAAGCTGCTTAACCATTAGGAATTACAATTCTTTATGGTTGGAGTATGATGATTT
CATCAAATGTTTGAATATTTACATAATTTTTATGTAACCATAATTAAACCAAATTAGTCTTTTTTTCTTCATA
CTTTTCTTCGGTAAATAGTGAAGAAATAATGGGCATATCTAATTAACCAGTTCTAGTGGGTGTTGTGATATCT
TTATATCTAGTTCAGTCTCAGATGTATGAATATGATTATATAGTCATGATTGAAGTTCAAAATGAGGAAGTAT
ACAAAATCCTCAGCCACTGAAAAATTCAGTTAACTTGTTTATACTCCTGTAAGCTCTAGTTAGTCACAAGACA
AAGTATATAGTAACACTTTGTAATGAAGTAACATTTTCTGCCCACATTAATTTTACTAAAGACCTAAATTGTT
AAAATTAATTGCCAATCTCTGGATATATTATGCTTAGTAAGTGTTTTGAAATTAAAGACCTTAAACATTTCAG
CAAGTAAATTTTGGATTCTAGCTCTGTTTTAAATTGAATCCTAATTTTCAAACCACTGCTACCCCAGATTCAT
ACCTGTTTTTGAAATCTTGTTTATGGAATGGAAAATTGACAGTATGGTAATAGTTTATTGACTGATTGGACAA
AGGATATTCTGGTTTTAACTGACTTTTCCATTTAAATAAAATTCATTTGATAATTTTGGTTGCAAAAGTGGAA
CACAGTGGAAGTATTTGGCTACAGGCTACCCAAATCTCATCAGATAAGGCTGTTTTCTTAAAGGAAATGCAAA
ATGAAATCATATGTTTTCCTTTTCCAATACAGTAAATTGCTTGTTTTCCTATGAATATCAGAAAAGATTTTGT
AAACACCTTTGCTGTAGTTTCAGGCAAGATCTTTCAGCAACATGTTTTTGCTCTTTGTAACTTAGAAAGTTAG
CTCTGAATCCAAAAACTACTGAAGTGAGTAATGCATATAATTTTACTTTTTTGGACCCTATAATGCCAGTGTG
TCAGGTTTCAGAATGATATTTAGTAGACAGAAATACCTAATTTTGTTTTGGAATCTTAATACCCTGTCCTCTT
CATAACTTTCTAGTGGTGATTTTAGCAAGTTTAATTATTTTGCTGAGGTCTTAGAAGACAGAAAGCTTATGCT
ATGTAAAGTGACATTGTTTCCAGATTAGGAAGTATTGGAATTAATTTGCTATTGCCAGTAAGTAATGGTTGAT
GGATATTAAGTGATTTTAGTCTAGAATGCTCTCAAAAAAATAGTAAAGAATTGTACTTCAGGGCCAGATGGCA
GCTCACGCCTGTAATCTCAGCACTTTGGGAGGCCAAGGTGGGGGATCACTTGAAGACAGGAGTTGGAGACCAG
CTCTAGGCAACATAGTGAGACCCTGTCTCTACCAAAAAGAAGAAAAAAGAAATCAACAACATGCAACCATAAG
AATGGATGAGATGGCCCTAAAAGAATAAGGATTACATATAATGAGAAGACGTGTGGGCTGAAATACCTAGTGA
ACAATATTTAAGGGAAACTGAAGTGCAAATGGCCTCACAGGTTTGTTTTTGTGTTTAAGACAAGGTCTCACTC
TGTTGCCTGGACTGGAGTACATAGCACGAACATGGTTTACTGCACCTCAGCTTCCTGGGCACAAGTGATTCTC
CCACCTCAGCCTCCCGAGTAGCTGGGAGTATAGGTGTGTGCCACCACGTCCAGCTAATTTTTTTATTTCCTTG
TGGAGATGGGGTCTCATGACCTTGTCCAGGATGATCTCAAACTCCTGGGCTCAAGCAATCCTGTGTTGGCCTC
CTAAACTGCTGAGATTATTGCAAGTGCCTCCTTGCCCAGCCACATGTTGTTGATTTCTTTTTTCTTTTTTTTT
CTTTCTTAATTTTTTTTTTTTTTTTTTTTTTTGAGATTGATGGAGTCTTGCTTTGTCTCCCAGGCTGGAGTGC
AGTGGCGCAATATCGGCTCACTGCAACCTCTGCCTCCCGGGTTCTAGCTATTCTCCTGCCTCAGCCTCCCAAG
TAGCTGTGATTACAGGCGTGTGCCACCATGCCCAGCTAATTTTTGTATTTTTAGTAGAGATGGAGTTTTGCCA
TGTTGGCCAGGCTGGTTTCAAACTCCTGATCTTAGGTGATACACCCGCCTCGGCCTCCCAAAGTGCTGGGATT
ACAGGCGTGAGCCACGTCCCCCAGCCAGTTTCTTAATCTATACATCTAGCCCAGTCCATGCCCCTGTTTCAGA
CTATTATATCCAACCACCTGCTATACATCTCATAAAGGTATCTCAAACACAGCATATCTAAAGCTGAAGTCAT
CATCTTGCCCTGGTTTTTCCTGTCTCTTTGCTGATGGCATCCCATTTACCCAGTCATTCAAACTGGAAATCTA
AAAGCCTCACTTAGCAAGAGTTTGGAGGCAGAATATGATAAAGAACAAGGACTCTGGGAGGCCAAGGCAGGTG
GATTGCTTGAGGTCAAGAGTTCGAGACCAGTCTGGCCAACATGGCGAAACCCCGTCTTTGCTAAAAAAACACA
AAGAAATTAGCTAGACGTGGTGGCACATGCCTGTAGTCCCAGCTGTGTGGGAGGCTGAGGCAGGGGAATTGCT
TGAACCTGGGAGGTGGAGGTTGCAGTGACCCAAGATTGCATGCACCACTGCACTCCAGCCTGGGTGACAAAGC
GAGACCCTGTCTCAAAAAAAACAAGGACTCTACAGATAGATAGACATCATATATCATATTAGTTTGAATCCTG
GCTGTTAGCTGTTAGACTTGGGCAAATAATTTAACCTCAACTTTCCCTATCTATAAAATGGGAATTAAAATAT
TTGCACCTTATAGGGTTATTGTGAGGATTAAATAGGAACATTGTATAAAGCACTTAAAACAGTACCTGGGACA
TACTAAGTAATATAATTGTTAACTCTTACTAGCATTCTGTCCCTTTTATTTCCTAAATATCTCTCATGCCCAT
CTCCTAAATATCTCTTTCCTAAATATCTCTCATGCTTTTGGCTTAAGACCTCTTTTCCTCCTTATCTATTGAC
TGGACTGCGGCAAATGCCTGCTAATCGTTATTTTTGTGTTCATTCATTTAGCAAGCCAATTTATTACGCGCTT
AGGGTGCTGCCAGGGCTACAAAAGCTGTTGAGACTGTACTTGATATGAAGAAGCTTGCTGATTATCATGGGAA
GACTGACATAAGGAAGCACCATAAAATTCTGCTGTATGAGAGGTATACACGGGATACTGGGGGTTAATAATTG
AGGGTATGGTCCATTCAACATGAGTGAGACAGAAACAATTCATAAAGGAGATGAAATGTCTTGAGGAATGAGC
TCTTAGAAGAATAGTTTTCAAATGAGTGTGCATCACAGTCACCTGTAAGACTTATTAAAACAGATCGCTGGGC
CCTACACCCAGAGGCTGTGGTTCAGTAGGCTGTAGTAAACCAGTAATTTGTATTTCTATGACGTTCCCAGGTT
CTAATGCTGTTCCCCAAGGCCACACCTTGGAAACCACCACATTAAAATACCCAGAAGGCATTAATTCCCAGTC
CTTCCTCTACACAGCTGCAAAACAATGGTCCTGACCATTTCATCTTTGCACTACATCCTTCACTGTCTCTCTT
TTGCCCATAGGATAAGTACAAACTAGATCTGGTTACTGCCTGCCCCACCAGCCTCAGCATCTCTCACAACTAG
GACTAACTTTTTCTTCTGACAACTATAAAATATTTCCCTTGCCTTCTCAAGTTTGCTCAAGGTCAAGTTATGC
CTTTTGCCTGGAATGACTTGACTTCTCTTTTGTTTTACTTAGCTGGCTGCTTTTCATCTTGTAGGTTAGGTCA
AGGACTCCAGGAAGTCTTCCCTGGACAAGTAATGAAGAGGGCATAATCCAAGGGCCAACTCCCATGTTTGGAA
CCTGACTCCATTTTCAGGCACGTAATATTGTCAAATTCCTTTTAAAAGCACCTGTCTGTCTGTTAACGTTGGT
GCAGATACTGCTATTCCCCTCCTCCATACCATTGCTGATGGTTACTGAGGGTATGGGAAGGGCCGACTAGTCC
AGCTGTTCACAAACAGCCCTTAATGTCAAACTGAATACTGCCAACGTAGTTCCAGTTTCTGTATCTAAAGACT
CAGCTTGGAGTCACTTGTCTGGACTAAAAGTAACCCCTCCTTGTCTGGTTTGTGACTTTCTGTACTCTGATGC
CCCCAGCTTTCTGCCTTCTAGAAATTTGTCAGAATTTCCAAAATTCTTGGGCCTTCCTTCTTGCTCTATATAT
GGTTTTGGATTCATTCCTTTTAAAAAATATTTACTGTCATTTCAGTAGAATTTTGACACAATAAATATAAGCA
CATCAGA
(SEQ ID NO; 131)
MASASYHISNLLEKMTSSDKDFRFMATNDLMTELQKDSIKLDDDSERKVVKMILKLLEDKNGEVQNLAVKCLG
PLVSKVKEYQVETIVDTLCTNMLSDKEQLRDISSIGLKTVIGELPPASSGSALAANVCKKITGRLTSAIAKQE
DVSVQLEALDIMADMLSRQGGLLVNFHPSILTCLLPQLTSPRLAVRKRTIIALGHLVMSCGNIVFVDLIEHLL
SELSKNDSMSTTRTYIQCIAAISRQAGHRIGEYLEKIIPLVVKFCNVDDDELREYCIQAFESFVRRCPKEVYP
HVSTIINICLKYLTYDPNYNYDDEDEDENAMDADGGDDDDQGSDDEYSDDDDMSWKVRRAAAKCLDAVVSTRH
EMLPEFYKTVSPALISRFKEREENVKADVFHAYLSLLKQTRPVQSWLCDPDAMEQGETPLTMLQSQVPNIVKA
LHKQMKEKSVKTRQCCFNMLTELVNVLPGALTQHIPVLVPGIIFSLNDKSSSSNLKIDALSCLYVILCNHSPQ
VFHPHVQALVPPVVACVGDPFYKITSEALLVTQQLVKVIRPLDQPSSFDATPYIKDLFTCTIKRLKAADIDQE
VKERAISCMGQIICNLGDNLGSDLPNTLQIFLERLKNEITRLTTVKALTLIAGSPLKIDLRPVLGEGVPILAS
FLRKNQRALKLGTLSALDILIKNYSDSLTAAMIDAVLDELPPLISESDMHVSQMAISFLTTLAKVYPSSLSKI
SGSILNELIGLVRSPLLQGGALSAMLDFFQALVVTGTNNLGYMDLLRMLTGPVYSQSTALTHKQSYYSIAKCV
AALTRACPKEGPAVVGQFIQDVKNSRSTDSIRLLALLSLGEVGHHIDLSGQLELKSVILEAFSSPSEEVKSAA
SYALGSISVGNLPEYLPFVLQEITSQPKRQYLLLHSLKEIISSASVVGLKPYVENIWALLLKHCECAEEGTRN
VVAECLGKLTLIDPETLLPRLKGYLISGSSYARSSVVTAVKFTISDHPQPIDPLLKNCIGDFLKTLEDPDLNV
RRVALVTFNSAAHNKPSLIRDLLDTVLPHLYNETKVRKELIREVEMGPFKHTVDDGLDIRKAAFECMYTLLDS
CLDRLDIFEFLNHVEDGLKDHYDIKMLTFLMLVRLSTLCPSAVLQRLDRLVEPLRATCTTKVKANSVKQEFEK
QDELKRSAMRAVAALLTIPEAEKSPLMSEFQSQISSNPELAAIFESIQKDSSSTNLESMDTS*

[0126] An amino acid sequence for the protein encoded by the CASP3 gene that is a regulator of T cell exhaustion/dysfunction resistance is available from the UniPROT database at accession no. P42574, cDNA NM_001354777, with gene location at Chr 4: 184627696-184650062.

(SEQ ID NO: 132)
AGTGCAGACGCGGCTCCTAGCGGATGGGTGCTATTGTGAGGCGGTTGTAG
AAGAGTTTCGTGAGTGCTCGCAGCTCATACCTGTGGCTGTGTATCCGTGG
CCACAGCTGGTTGGCGTCGCCTTGAAATCCCAGGCCGTGAGGAGTTAGCG
AGCCCTGCTCACACTCGGCGCTCTGGTTTTCGGTGGGTGTGCCCTGCACC
TGCCTCTTCCCCCATTCTCATTAATAAAGGTATCCATGGAGAACACTGAA
AACTCAGTGGATTCAAAATCCATTAAAAATTTGGAACCAAAGATCATACA
TGGAAGCGAATCAATGGACTCTGGAATATCCCTGGACAACAGTTATAAAA
TGGATTATCCTGAGATGGGTTTATGTATAATAATTAATAATAAGAATTTT
CATAAAAGCACTGGAATGACATCTCGGTCTGGTACAGATGTCGATGCAGC
AAACCTCAGGGAAACATTCAGAAACTTGAAATATGAAGTCAGGAATAAAA
ATGATCTTACACGTGAAGAAATTGTGGAATTGATGCGTGATGTTTCTAAA
GAAGATCACAGCAAAAGGAGCAGTTTTGTTTGTGTGCTTCTGAGCCATGG
TGAAGAAGGAATAATTTTTGGAACAAATGGACCTGTTGACCTGAAAAAAA
TAACAAACTTTTTCAGAGGGGATCGTTGTAGAAGTCTAACTGGAAAACCC
AAACTTTTCATTATTCAGGCCTGCCGTGGTACAGAACTGGACTGTGGCAT
TGAGACAGACAGTGGTGTTGATGATGACATGGCGTGTCATAAAATACCAG
TGGAGGCCGACTTCTTGTATGCATACTCCACAGCACCTGGTTATTATTCT
TGGCGAAATTCAAAGGATGGCTCCTGGTTCATCCAGTCGCTTTGTGCCAT
GCTGAAACAGTATGCCGACAAGCTTGAATTTATGCACATTCTTACCCGGG
TTAACCGAAAGGTGGCAACAGAATTTGAGTCCTTTTCCTTTGACGCTACT
TTTCATGCAAAGAAACAGATTCCATGTATTGTTTCCATGCTCACAAAAGA
ACTCTATTTTTATCACTAAAGAAATGGTTGGTTGGTGGTTTTTTTTAGTT
TGTATGCCAAGTGAGAAGATGGTATATTTGGTACTGTATTTCCCTCTCAT
TTTGACCTACTCTCATGCTGCAGAGGGTACTTTAAGACATACTCCTTCCA
TCAAATAGAACCACTATGAAGCTACCTCAAACTTCCAGTCAGGTAGTTGC
AATTGAATTAAATTAGGAATAAATAAAAATGGATACTGGTGCAGTCATTA
TGAGAGGCAATGATTGTTAATTTACAGCTTTCATGATTAGCAAGTTACAG
TGATGCTGTGCTATGAATTTTCAAGTAATTGTGAAAAAGTTAAACATTGA
AGTAATGAATTTTTATGATATTCCCCCCACTTAAGACTGTGTATTCTAGT
TTTGTCAAACTGTAGAAATGATGATGTGGAAGAACTTAGGCATCTGTGGG
CATGGTCAAAGGCTCAAACCTTTATTTTAGAATTGATATACACGGATGAC
TTAACTGCATTTTTAGACCATTTATCTGGGATTATGGTTTTGTGATGTTT
GTCCTGAACACTTTTGTTGTAAAAAAATAATAATAATGTTTAATATTGAG
AAAGAAACTAATATTTTATGTGAGAGAAAGTGTGAGCAAACTAACTTGAC
TTTTAAGGCTAAAACTTAACATTCATAGAGGGGTGGAGTTTTAACTGTAA
GGTGCTACAATGCCCCTGGATCTACCAGCATAAATATCTTCTGATTTGTC
CCTATGCATATCAGTTGAGCTTCATATACCAGCAATATATCTGAAGAGCT
ATTATATAAAAACCCCAAACTGTTGATTATTAGCCAGGTAATGTGAATAA
ATTCTATAGGAACATATGAAAATACAACTTAAATAATAAACAGTGGAATA
TAAGGAAAGCAATAAATGAATGGGCTGAGCTGCCTGTAACTTGAGAGTAG
ATGGTTTGAGCCTGAGCAGAGACATGACTCAGCCTGTTCCATGAAGGCAG
AGCCATGGACCACGCAGGAAGGGCCTACAGCCCATTTCTCCATACGCACT
GGTATGTGTGGATGATGCTGCCAGGGCGCCATCGCCAAGTAAGAAAGTGA
AGCAAATCAGAAACTTGTGAAGTGGAAATGTTCTAAAGGTGGTGAGGCAA
TAAAAATCATAGTACTCTTTGTAGCAAAATTCTTAAGTATGTTATTTTCT
GTTGAAGTTTACAATCAAAGGAAAATAGTAATGTTTTATACTGTTTACTG
AAAGAAAAAGACCTATGAGCACATAGGACTCTAGACGGCATCCAGCCGGA
GGCCAGAGCTGAGCCCTCAGCCCGGGAGGCAGGCTCCAGGCCTCAGCAGG
TGCGGAGCCGTCACTGCACCAAGTCTCACTGGCTGTCAGTATGACATTTC
ACGGGAGATTTCTTGTTGCTCAAAAAATGAGCTCGCATTTGTCAATGACA
GTTTCTTTTTTCTTACTAGACCTGTAACTTTTGTAAATACACATAGCATG
TAATGGTATCTTAAAGTGTGTTTCTATGTGACAATTTTGTACAAATTTGT
TATTTTCCATTTTTATTTCAAAATATACATTCAAACTTAAAATTA
(SEQ ID NO: 133)
MENTENSVDSKSIKNLEPKIIHGSESMDSGISLDNSYKMDYPEMGLCIII
NNKNFHKSTGMTSRSGTDVDAANLRETFRNLKYEVRNKNDLTREEIVELM
RDVSKEDHSKRSSFVCVLLSHGEEGIIFGTNGPVDLKKITNFFRGDRCRS
LTGKPKLFIIQACRGTELDCGIETDSGVDDDMACHKIPVEADFLYAYSTA
PGYYSWRNSKDGSWFIQSLCAMLKQYADKLEFMHILTRVNRKVATEFESF
SFDATFHAKKQIPCIVSMLTKELYFYH*

[0127] An amino acid sequence for the protein encoded by the CBFB gene that is a regulator of T cell exhaustion/dysfunction resistance is available from the UniPROT database at accession no. Q13951, cDNA NM_001755, with gene location at Chr 16: 67028984-67101058.

(SEQ ID NO: 134)
GGTGAGCGCTGGGGCTGCGCGGGCGGCAGGCAACGGCTGAGGCGGCGGCG
GCGGCGGCGGCGGCGTGGGTTGGGCTCGAGCGGGCGGCGGCGCCTCAGAC
TCCCCGGAACGGGAGCCCACGCGGGCGGGCGCCTGAAACAAAGGGAAGCG
GGCGTCCGGGCGCCGCGGGTGGGCGGTCAGTCGGTCAGCGCGGAGCCAGC
CAGCGGGTGCCCGCGCAAGCCCCGAGCGCGGCCGGCCGGCGCGGCCTCAG
GGCGGGAAGATGCCGCGCGTCGTGCCCGACCAGAGAAGCAAGTTCGAGAA
CGAGGAGTTTTTTAGGAAGCTGAGCCGCGAGTGTGAGATTAAGTACACGG
GCTTCAGGGACCGGCCCCACGAGGAACGCCAGGCACGCTTCCAGAACGCC
TGCCGCGACGGCCGCTCGGAAATCGCTTTTGTGGCCACAGGAACCAATCT
GTCTCTCCAGTTTTTTCCGGCCAGCTGGCAGGGAGAACAGCGACAAACAC
CTAGCCGAGAGTATGTCGACTTAGAAAGAGAAGCAGGCAAGGTATATTTG
AAGGCTCCCATGATTCTGAATGGAGTCTGTGTTATCTGGAAAGGCTGGAT
TGATCTCCAAAGACTGGATGGTATGGGCTGTCTGGAGTTTGATGAGGAGC
GAGCCCAGCAGGAGGATGCATTAGCACAACAGGCCTTTGAAGAGGCTCGG
AGAAGGACACGCGAATTTGAAGATAGAGACAGGTCTCATCGGGAGGAAAT
GGAGGTGAGAGTTTCACAGCTGCTGGCAGTAACTGGCAAGAAGACAACAA
GACCCTAGTCCTGGTTCCAATTTAGGTGGTGGTGATGACCTCAAACTTCG
TTAATTAATAGCACAGCAGATGTGTGCTGCCCATCTTTACATACACATTG
CTTCTAGTTGGCAGAAATAATTGATTAAAAGACCAGAAACTGTGATAACT
GGAGGTACTACGGTCTATTTCTCAACCTTAGGCAGTAATAGACATCACAA
ACTGCCATGGTTTTGCACTATGATTATAATACCTGCATTTCTAATTTTTT
AAGCATGTAGCCAGTAATAATTTGAAGTTTTTTTTCTATGCAAGCTTACC
TTGTTGGCATTATTTTAGGGAGTTGAAACTATCAACTGTAAAGCTCCTTT
TCTTCCACTTTAATTTAAAAGTTCATGTCATTTAAAAACAAGTCAAGAAA
TTAAAATTGTATCAGAGGGTTTTCTCTAATCATTTTTTCTATTTTTTTTT
TTGTACTTCTAGATGTTTTGGTTATACAGCTTCATTTTAGATGAGCATTC
TTATTTTTTGTTTTGTTTGCCCCATTTCCTTTTGTGTTTTTATAGTCTAT
AGCATTTTAAAACTGCTGATGTTGTTTGCATTATTTACAGGCTAAAAACT
TAGTAGCATAGAGCTGTCTGCCACAGCCTTCTGACAAAGTTTACAGTTAT
TAAAGTTGCAGTATCCTTTTAAATGCTAGTAATCAGCACTCTTTCTTTTT
TTTTTTTTTAATAGAGACAGGGTCTCGCAGTGTTGCCCAGGCTGGTCTCG
AACTCCTGGCATCAAGCGATCCTCCTGCCTTAGCCTCCCAGAGTACTGGG
ATTACAGGCTCTTTCTTTTTAAACATAAAAGTTTTAAATTGGTATTAACT
CTGTACTCTGCCCTAGATTGTTTTAGCTTCTGTTCTGTAATCATGAGTTT
GGTTGGAGATATTCTCCATAGATGATCTTCTACTGAAATGCCTAAAGAAG
TCACAGGCTGGCTTCTGTTTTATTCAGGGATTTTTTTAAAAAGTCAATCA
GAAAAGGGATACTGGAGCTTCTTCATGTATGTAACAGCATATTAAACTGG
AGACAGTGATGAATCAGCTACAAAGGTAATATTGTATTAAAATCATGTTT
AAGATAGCTGCTTTTATGTGTATTTTATATTGCATGCTTTTGTAAAAACA
TGCTGGGTGATGAAAGATTAGTTTTAGAGAGAAAATGTTCATCTGTGCAG
AGGATGCATTTTCTTCCATTAATTCTGGAAAAAACGTTCACAGTTATATA
TATGGTATTTTGCAAAAGGACTATTAATAGAACCTTTTGAGATGAATTAA
TGTAAGAATATTTTTTAAATAGGCTTACTGTCAAATTGCAACTTTTTTTT
TAGATACAGAGTGGAAAACAGTGCTAAGTCATTTGGCACCTCCTTACAAA
TATTTTTCATGGTCACATTTATTAAATGTTACTACATTTCTGAATTTTTG
AAAAATGTATTTTATCATTAAATGGCATTATTTTAAAGGGTGAAAAACTG
ACACAGTCAATTCAGAAAATGGACTGAAGTCTGAATAAGGTCATTGCATT
TAAAAAGCATATAACTGTACTTGACTGATGAGGGAGGTGTTACTTTCATT
GTATATAGGTCTTATTTCATAAACAGATATCCTGTATCAAATAAAAGTAT
TTGTTATATATTTGAAGTTATGCATGGAAAGGAGTGTGTTTAAATTGTTA
CAAACAATAATGCGTCATTAAAGGCCATGCTGATCTTGCATAACTATAAG
TACTATGAATGAATTTGGTTGGTTTTGGTGTTGTACAGCTCACATGTTTA
CACACTCAGTGCCCTAATTTCCCCTGAGGGAATCGCTTTTTAAGTGATCC
TTACAGTGGTGTTTTATGTTACTTTATTACAGAGCTCCTTGGTTTTTTAC
TTCTGCACTTAAATTTTTTTAAATAACATGATGATGGTACATTTTCCTCT
ATTGTCTAGCTAAGGGCTTTCGGTCCACCAGTAAATAAGATCAAATGCTC
TTAAATGTTCCTGTTACCATCCTAATGTAAATACTGGATTTTTCTGTCAT
TTAGCACCATGCTGCTTCTGTCTGTCTTAATGCTGGCATTAAGATCATGA
GCCCTTTTTCTCCAGTAGTACAGGCTTTGAAAACTACTTCTATTAAGTTA
TTGATGCAATTTGATATTTTTTCATAATCTATATTTAAACAAAATTACAT
CATTGCATCATCTTTTCTAAATTCATCTCCATTAAAACTTGCCTTAAGCT
ACCAGATTGCTTTTGCCACCATTGGCCATACTGTGTGTTTGTTTGTTTAA
TTTACTTTCACAATAAACTTCTGTGTAGTAAAAA
(SEQ ID NO: 135)
MPRVVPDQRSKFENEEFFRKLSRECEIKYTGFRDRPHEERQARFQNACRD
GRSEIAFVATGTNLSLQFFPASWQGEQRQTPSREYVDLEREAGKVYLKAP
MILNGVCVIWKGWIDLQRLDGMGCLEFDEERAQQEDALAQQAFEEARRRT
REFEDRDRSHREEMEVRVSQLLAVTGKKTTRP*

[0128] An amino acid sequence for the protein encoded by the CDK13 gene that is a regulator of T cell exhaustion/dysfunction resistance is available from the UniPROT database at accession no. Q14004, cDNA NM_003718, with gene location at Chr 7: 39950121-40099580.

(SEQ ID NO: 136)
ACTTCCGCGTTGCGCTGCCCGAGCCGAGAGCGCGGCCAAGGCCGCTCCCCCACCCCCGGGGGCACTTGGAGGA
CTCGGGACTCCCCCGCAGGTCAGCGCCCGGCGCATCTGGTGTTTTCGCTGCCGAGGATAGGACGACGAGCGCA
ATCGGGAGCTCCGCCGCCCGGATTCCTGCTTCCCTGGGGCCCGGAGGCTGCTGCGTACCCCACTGTGACCTGG
AACCCAGGGACCCGAGTCCCGACCCGGATTATCGTGGCGCTTTTCCCGGCCGGCTCTGGTGCTCGGTGTCCCT
CCGCCGCCGCTCCCGTTTCCGGCGGGGGAGATGGCCAGGATCTGACCCGGGAGGAGGCCGCACCCGCGCCGCG
CTCTGCGGCTGGCTCTAGGCGATGCCGAGCAGCTCGGACACGGCGCTGGGGGGAGGCGGGGGCCTGAGCTGGG
CGGAGAAGAAGTTGGAGGAACGCCGCAAGCGGAGGCGATTCCTGTCCCCTCAGCAGCCGCCGCTGCTGTTGCC
GCTCCTGCAGCCGCAGCTCCTGCAACCGCCGCCGCCCCCGCCGCCTCTGCTCTTCCTGGCTGCTCCCGGCACG
GCCGCCGCCGCAGCCGCCGCCGCCGCGGCCTCCTCCTCTTGCTTCAGCCCGGGCCCCCCTCTGGAGGTCAAGC
GGCTGGCGAGAGGCAAGAGGCGCGCAGGAGGGCGGCAGAAGCGGCGTCGCGGGCCCCGCGCCGGGCAGGAGGC
GGAGAAGCGTCGGGTCTTCTCGCTGCCCCAGCCGCAGCAGGACGGCGGTGGCGGTGCTAGTAGCGGCGGGGGT
GTGACCCCGCTGGTGGAATACGAGGATGTGAGCTCCCAGTCCGAGCAGGGGCTGCTGCTGGGGGGGGCCAGCG
CGGCAACGGCGGCGACGGCTGCCGGGGGAACGGGGGGCAGCGGCGGGAGTCCGGCCTCCTCCTCCGGCACCCA
GCGGCGCGGGGAGGGGTCGGAGCGCAGGCCCCGCCGGGACCGCCGCAGCAGCAGTGGCCGCAGCAAGGAGCGC
CACCGCGAGCACCGGCGGCGGGATGGGCAGCGCGGTGGCAGCGAGGCCTCCAAGTCCCGCAGCCGCCACAGCC
ACAGCGGCGAGGAACGGGCCGAGGTCGCCAAGAGCGGCAGCAGCAGCAGCAGCGGCGGCCGCCGGAAAAGCGC
TTCGGCCACATCCAGCAGCAGTAGCAGCCGCAAGGACCGGGACTCGAAGGCCCACCGCAGCCGGACTAAGTCG
TCCAAGGAGCCGCCTTCGGCCTACAAGGAACCGCCCAAGGCCTACCGGGAGGACAAGACCGAGCCTAAGGCCT
ACAGGCGGCGGCGGTCCCTCAGCCCACTGGGAGGCCGGGACGACAGCCCGGTGTCCCACAGGGCCTCTCAGAG
CCTGAGGAGCCGCAAGTCCCCCAGCCCGGCAGGAGGTGGCAGCAGCCCCTATTCTCGGCGGCTGCCGCGCTCC
CCGAGCCCCTACAGTCGCCGCCGCTCCCCCAGCTACAGCCGCCACAGCTCCTACGAGCGGGGCGGCGACGTGT
CCCCTAGTCCCTACAGCAGCAGCAGCTGGCGCCGCTCTCGCAGTCCCTACAGCCCTGTGCTCAGACGGTCTGG
AAAATCCCGAAGCAGAAGCCCGTATTCATCTAGGCATTCAAGATCTCGTAGCAGGCACAGATTGTCTAGATCC
AGAAGTCGTCATTCTAGTATTTCTCCTAGCACACTAACTCTGAAGAGTAGCCTGGCAGCTGAATTGAACAAGA
ATAAAAAAGCACGAGCAGCAGAGGCAGCAAGAGCCGCAGAAGCAGCGAAAGCTGCAGAAGCAACTAAGGCTGC
TGAGGCTGCTGCCAAGGCTGCAAAAGCTTCAAACACTTCTACACCTACCAAGGGGAACACGGAAACTAGTGCC
AGTGCATCACAAACAAACCATGTGAAGGATGTGAAGAAAATTAAAATTGAACATGCACCTTCTCCCTCAAGTG
GTGGAACTTTAAAAAATGACAAAGCAAAAACAAAGCCACCTCTTCAGGTAACGAAGGTGGAAAATAATTTGAT
TGTAGATAAAGCCACCAAGAAAGCAGTCATAGTTGGAAAGGAGAGTAAATCTGCTGCTACAAAGGAGGAATCA
GTATCTCTTAAAGAGAAAACCAAACCACTTACACCAAGCATAGGAGCCAAGGAGAAGGAGCAACATGTAGCTT
TAGTCACCTCTACATTACCACCGTTACCTTTGCCTCCCATGCTGCCTGAAGATAAAGAAGCTGATAGCTTACG
AGGAAATATTTCAGTAAAAGCAGTTAAAAAAGAAGTAGAAAAGAAACTCCGATGTCTTCTTGCTGATTTACCG
CTGCCCCCTGAGCTACCAGGAGGAGATGATCTTTCAAAGAGTCCAGAGGAAAAGAAAACAGCAACACAGTTAC
ATAGTAAAAGGAGGCCTAAAATATGTGGGCCTCGCTATGGTGAAACCAAAGAAAAAGATATTGACTGGGGAAA
ACGCTGCGTGGATAAATTTGATATCATCGGAATTATTGGAGAAGGTACTTACGGACAAGTTTACAAAGCCAGG
GATAAAGACACTGGAGAAATGGTAGCCTTAAAAAAAGTACGTCTGGATAATGAAAAGGAAGGCTTTCCAATTA
CAGCAATTCGAGAAATTAAAATTCTCCGGCAGCTTACCCATCAGAGTATTATCAATATGAAGGAAATAGTGAC
TGATAAAGAAGATGCTTTGGATTTCAAGAAGGACAAAGGTGCATTTTATCTGGTGTTTGAATATATGGACCAT
GATCTGATGGGACTACTGGAATCAGGCTTGGTTCATTTTAATGAAAATCACATAAAGTCATTTATGAGACAGC
TCATGGAGGGTCTGGATTATTGTCATAAGAAGAACTTTTTGCATAGAGATATTAAATGTTCCAATATCCTTCT
AAATAATAGAGGGCAGATAAAACTTGCAGACTTTGGACTTGCTCGATTGTATAGCTCAGAAGAAAGTCGGCCG
TATACTAACAAGGTAATTACTTTATGGTACCGTCCACCTGAACTGCTACTGGGAGAAGAACGATACACACCAG
CCATTGATGTATGGAGCTGTGGCTGTATCCTTGGCGAACTCTTCACTAAAAAACCTATATTTCAAGCAAATCA
GGAACTTGCACAACTAGAATTAATAAGCCGAATATGTGGGAGTCCATGTCCTGCAGTGTGGCCTGATGTAATC
AAACTACCATATTTCAACACCATGAAACCAAAGAAGCAATATCGTCGAAAGTTAAGAGAAGAATTTGTTTTTA
TTCCTGCAGCTGCGCTAGACTTATTTGATTACATGCTTGCCTTGGATCCTAGTAAGCGCTGCACTGCTGAACA
GGCTCTTCAGTGCGAGTTCCTCCGAGATGTGGAACCCTCAAAAATGCCTCCACCAGATCTCCCTTTATGGCAA
GATTGTCATGAGTTATGGAGTAAAAAGCGAAGAAGACAGAAGCAGATGGGCATGACTGATGATGTTTCCACAA
TTAAAGCCCCCAGGAAGGACTTGTCTCTGGGCTTGGATGACAGCAGAACCAACACACCCCAGGGTGTGCTGCC
ATCTTCACAGCTGAAATCTCAGGGCAGCTCAAATGTGGCACCTGTAAAAACAGGCCCTGGACAGCACTTAAAC
CACAGTGAATTGGCAATTCTACTAAACCTACTACAATCTAAAACAAGTGTTAATATGGCTGATTTTGTCCAAG
TGTTGAACATTAAGGTAAACTCTGAGACTCAACAGCAGCTAAATAAAATAAACCTTCCTGCTGGAATTTTGGC
AACAGGTGAAAAACAGACAGATCCATCAACACCACAACAGGAGTCTTCGAAACCGTTGGGAGGAATTCAGCCT
TCTTCTCAGACCATCCAGCCTAAAGTGGAGACTGATGCTGCCCAGGCGGCTGTGCAGAGTGCATTTGCAGTTC
TGTTGACTCAGTTAATAAAGGCTCAGCAGTCAAAGCAGAAAGATGTGCTACTAGAAGAGAGGGAAAATGGATC
GGGACATGAAGCGTCATTACAACTCAGGCCACCTCCAGAACCTAGCACTCCGGTGTCGGGACAAGATGACCTC
ATCCAGCATCAAGATATGAGGATCTTGGAGCTAACGCCAGAACCAGACCGGCCTCGAATTCTGCCTCCTGACC
AACGACCTCCCGAGCCTCCTGAACCACCACCAGTCACTGAGGAAGATCTAGATTATCGGACAGAAAACCAGCA
TGTACCCACCACCAGTTCTTCATTAACTGACCCTCATGCCGGAGTGAAGGCAGCCCTGTTACAGCTGCTTGCT
CAGCATCAGCCCCAGGATGACCCCAAAAGAGAAGGTGGGATTGATTATCAAGCAGGAGACACTTACGTGTCCA
CTTCAGACTACAAGGACAACTTTGGATCCTCTTCTTTCTCTTCTGCTCCTTATGTTAGCAATGATGGTCTAGG
AAGCAGTTCTGCTCCACCACTAGAACGACGTAGTTTCATTGGAAATTCAGATATTCAGTCTTTGGATAACTAC
AGTACTGCTTCATCTCATTCTGGTGGTCCACCTCAGCCTTCTGCCTTTTCTGAGTCATTTCCCAGTTCAGTAG
CTGGATATGGAGACATTTACCTCAATGCTGGTCCCATGTTGTTTAGTGGAGACAAGGACCATAGATTTGAATA
TAGCCATGGTCCTATTGCAGTCCTGGCAAACAGCAGTGACCCTTCCACGGGGCCAGAGAGTACTCATCCTTTG
CCAGCAAAGATGCACAACTATAACTATGGTGGTAACTTACAGGAAAATCCGAGTGGCCCCAGCCTCATGCATG
GACAGACCTGGACTTCTCCTGCCCAAGGACCTGGATATTCACAAGGATACAGGGGACATATTAGCACATCAAC
TGGCAGAGGCAGAGGCAGAGGGTTACCATACTGAGTATCTGTTTTTCCTCAGGCACATCATTTTTATCTGGAA
AGACTTTTCTAGCTGCAATTTAAGGCAGCAATCCAAGAGACTTGAATAATAATAATTCAACAACAGCTTTATT
TTTATGTGGAGAAGGGTCTTGCATACAATAGTTTAAAAAAGACAAAAAAAACCTTTGCTTAAATTCATGCTGT
TCTAAAAACTAGATCGATTGTACATCTTCACAAATTCTAGTTAACAATTTTATTTTGTATTCTTGCAGTTTTA
AGTGGATGCTAATTTTAGGGGCATAAGCCTTTTATGGCCCTCTTGCAGATCTTCTGAACTATGCACATTTGTG
CTTTTTTTGTAAGTTTGGACCAACTTTTATGTAACAAACAGCCCCTCCCCACCTCCAGTTTTACAACAATCAG
AAAGGGCACTGATTTATTTGGTATTTTTCTTTTTACAAAGCTACCTTTAGTCAAAGGTCACTGTCAGTCTTTG
CACCTGCTTTCAGTGTTATTGTGAAAGGTGTACTTTGTGCTCATTTCAGAAAATAAAACACAACCTTTCTCTT
GATGCAACAGTTTTATAAAAAAAAAAATGGTCAACGTTATTTTTGTTTTGTTTTGCAGATTATCAAAGCCTAG
CAAAATGCATTTAAATGAAATAGTGGGTTTTATATGAAAACTATGGGTGGGGTGGGGAGGGAAAGTAAGTGCC
TTAACAGGTAAGCTTAAGGTCTGAAAAAAATAGTTAACTTTTACCCCCATTTGTCTTTTAAAGGGAATCAATG
CATTAAAAAGGCAAGAAACTCTGAAGTTTCAGGGGCTGCCTGTTCAGTTCCTGTTAGGTCCATTCCCTCTGCT
TGTCACACTTTCTCCTTTTCTGCCTGTCTTTGGGCTGTGTTGCCTTTCACTACCACCTTCTCTTGATAGGGGA
GTGAGAGCAAAGAAAGGGAGTAGAACTGCAATCAGTACATATTGTTTGAGAAGTTCTACAAAGTTTTGTCATT
TAAATGGTTGAAAGTAATAGCTCCAGGAGAATTTTAGAGTACCATTTTCTTTCAGGCTGCCATATTATCCCTG
TTTCCATTTGCCATGGATAATTGGAGGGTCATGGTATAGAAGCAAGAGTTAATAACAGAACTTGCCTAAATGT
GTTAAAGTTCATGGGGGAGGGGTGGCAAATACCGTATTTTAAGTTATGCAATTGCCCTTTTAAGAAAGTCAAT
TCTATTCACTTGTTAACTAGAAACATTGCTTAGATTGAATTTATTGAAGCAAAAAGAAAAGGCAATGAGAGAG
AACTTTTATCTTCCTTCCTGTCACATTCTGTAAAGTTGATTATGACTTCTGCCAGACTTAGAGCAACAACTTT
AGTTCATTTTAACATTTTTTTTTAATGAAGAGCATCAAAGAATGGAGTAGTCCTTATTTAAACTGTAATGGTG
TCAAGTCTCACTGTGTGCACACTCTCACACATACACACACAATTATACTAATTCTAGAAAGGAACCAAAGGTA
AATAACCAGTGTTTCCATTATCACTAAATGGAAAAATTGACTGGAAGTTAGAGTTGTGCCAATTAATCATTTT
GTTCATCAACTGTTCTGGTAACTTATTTTTTTTTATTGGAATCTTAAATTGGAACAACTGTTACAGAATGTAT
ATTGCTCCAGTTCTAAAGCCAGTTAACCCTGTGCCCTCTAACTTATGAACCTTCATTTCAAAACAGTATGTGG
GAAGTCCTGTAGTTTGATAAGAGTAAAATTATTTTAAAGAGGATAATTTACCATTTTACTACTATAAAATAAG
TTGATATCAGTTGACCATTTTATTTTTTGATGGACTCTTTTTGTTGGGAGAAAGAAATGAATGGAAGAAAAAA
ATATGTTGCTTTTATTTGAATATTGATTACTAACAACTTATAAACTACATTGCAGGAAATGAAGAAATATTTT
GAAATTAGCAAAATAGCAACAGTATTCAAGTATCTGAAATTTTAATATGGTGAGTCTTAGAGCTTTAGACTTT
CCTATAAGTGACAGTATCTAAGTTATTCTTAATAGTCACACTTGATAATTCTGCTGACCATAAGCAGCTAACC
TACAGTTGAAGATATTTATGTGACATGAATAGCCTGTGTTTTAAAAATTAAATATTTTATATAAAATTGAACT
GTGTTTGGATAGTTTTTCTAATCAAACATTTCAGTTATATATTTATGTTGGGAGAGTGGCTGGGAGGACAGGG
AAATTGTTGCTTTGACATTGAAAATTTGAACTAGAACTTCTAATATTATCCTTACACAGCACTACTGTGAGAC
ATACTAGTCTTTTATATGTCACTTAGAAGAAAAAATGTTGCCAATTAAGCCACAATACAATGCTAAGACGTCA
TCAATTGTAAGCTGCATCCCAGATTCAGACATATTATATGAAAATATGTCTTATAATTGATGAAATATGATAG
TAAAAAATTTTAATGCTTCCCTTCATAGCATTTAATATTTTAATTCAGTGAATTTGGATTAATAGAACAAAGT
TGGGAAATCACTAGTTCTGTAGGTTATAACAGCAGTCATCGCTGAAAATTTGAGTGAAATCTAAAGAACACAA
AATATTGCTTAAATTTTTTGGAAAAAAGCAGGTAAGTCAGACTGCAAGTTAAGAAGACAAAAATATAAAAGAT
TTGACCTGCCAAAAGAAGAAAGTATTTATCTTCTCCCACGTGAAATTCCCTTTTGTATTTACTGACACAGCAG
GTTTTTCTGCATGCAACTCAGTATGTTTCCTACGTCTTCATTATTTGTTGGAGAGTTGCAAGTCATTTGTGAA
ACCTTAAAATGCCAATTTTAAGGAGTTGTCATTTGTGGAATGTGAAATAAGGTAATAATTCTAGCTGTGATTC
AGAGCTTTATTCTGTCAGCAAATACATAGTCAGTGCCTACAACATGCCAGGTAGTAATCTAGTCCTTGGGGTA
CATCAATAACCGTCAACAGTGTTAAATCATACTTTCAGTGTGCTGACAGTGAGCAAGATTTTTTTAAATGTCT
GGAGAAGTTAGTGGTATTTGCTACCCTCAGCTGTATCTAAATTGCACTTAAGTGAATGTAGGGCATGAAAATT
TGAGTATCTTTTTGAAATTTTAAATTGAAATTTGGATAGAGATGGTTATGGAGAGAAATCAAACAACTGGAAT
AGCTGTTTGATATCACTTAAAAGTGATAAAATTTTAAGTTGAATCTGGTCAGTTTGCAATGGCCTATTTGTAA
GAAATATCAAGACTTCTTGAGAAAAATGAAAAGTGAATACATAAATGCTTAAAATCTGGTACTTCTGAGTTAA
GGTTTTGCTCTTTGAGCTTAATCCAATTTGGGATGATTTTTCATCCTAGGGCTTTTTGTTTTCCTTTTTTATT
TTTATTTTTTCTTTTTTTAGGGGAAGGGGACTTGCTTTCTTTTCCAAAAAGGTGAATCCTTCTTGTAGGACAT
AGGTAAAAAAAACAAAGCTGAAATATATGTTTTGAATATAGATAGCTAATTCCCTGGGATATAATATCCTTTC
AATTTTTTTTTTTTTTTTGGCCCAGTCTGCCTTTTGATGTTTTAAAAGTCTGAACGAGATGTCCCAGTAACCT
AAAATTATCCAGTCGGTCTTCTTACTTTACAACTAAGAAAAATAAGGCTTAGAAAGAGGGATTGCCAGAAACT
TTGGCAGCTGGATTGCCTGTGCTTGTTCCTCTAAGCCATACCTAAATTCTGCAGTAAATACTTAACTTTTTAA
TAGGGAAATTGCTTCAAGATAACTTGACCAGTGATACGGTAAAATAATTAGACTATTGGACTAATGGTTTAAC
ACAAGTGGCTTTAAAAAGTCTGCTTAAAAAACAATTTTTATTTAGAAAAAATAGAAAAATAAAAACATCTTCA
AAATTTAGGAGCCTGAAGGGGCTGTTTGTTTCATATATGGATAATCTTTGAAAAGGCAAGTCCTGTATGTATT
TTTCATTTGTTGAAAGAAGATTGGTTATCAGTAGGCTTGCAAACATAATTTGCTTTTAAGTTCTTTCAAGGTT
TTATGCAATAAAACCTATTGATTTGGAACTTTAAAAAAAAAAACAACAAAAAAATACTTTCAGGGTTTTGTAA
TTTCAAGTGGTTTTTTAAGGGGAGCAATAGTTTGCCATTTACCAAAGGCTTCTCCAGATAATTTCTTAAATGT
TTCTACTTAAAAATAAAAGCTATTAATAATAAGCTGTCATGGGATCCATTTGAAGACAGGGAAAATAGAAAAT
TTTTATTGTAAAGGGAAGAACTTATCCTTTTAATTTTATGGACTAACAGAGTCTGCAGGTCTTAACTCATTTC
AGCCTGTCAAATGTGCAATTAAAAATGAATTTTCTAATTGTATTCAAATGAGGCTCTATAGTGAATACAGAAT
CACTCTTCTAAGTTTTTTCCCAGTTAATTTGTTTAAAAGTGTTGTACTCTCTTGCAAGAACGTTTAAAAGTTA
AGTCTTGTAACTGTTAACATCTAATGTATTAATATAAGCCATTTGTTTTTTACCATTTTTTTAAGGCCGTATT
CAATAGTCTGTAAATAAATTGCCGTAACACTCCCA
(SEQ ID NO: 137)
MPSSSDTALGGGGGLSWAEKKLEERRKRRRFLSPQQPPLLLPLLQPQLLQPPPPPPPLLFLAAPGTAAAAAAA
AAASSSCFSPGPPLEVKRLARGKRRAGGRQKRRRGPRAGQEAEKRRVFSLPQPQQDGGGGASSGGGVTPLVEY
EDVSSQSEQGLLLGGASAATAATAAGGTGGSGGSPASSSGTQRRGEGSERRPRRDRRSSSGRSKERHREHRRR
DGQRGGSEASKSRSRHSHSGEERAEVAKSGSSSSSGGRRKSASATSSSSSSRKDRDSKAHRSRTKSSKEPPSA
YKEPPKAYREDKTEPKAYRRRRSLSPLGGRDDSPVSHRASQSLRSRKSPSPAGGGSSPYSRRLPRSPSPYSRR
RSPSYSRHSSYERGGDVSPSPYSSSSWRRSRSPYSPVLRRSGKSRSRSPYSSRHSRSRSRHRLSRSRSRHSSI
SPSTLTLKSSLAAELNKNKKARAAEAARAAEAAKAAEATKAAEAAAKAAKASNTSTPTKGNTETSASASQTNH
VKDVKKIKIEHAPSPSSGGTLKNDKAKTKPPLQVTKVENNLIVDKATKKAVIVGKESKSAATKEESVSLKEKT
KPLTPSIGAKEKEQHVALVTSTLPPLPLPPMLPEDKEADSLRGNISVKAVKKEVEKKLRCLLADLPLPPELPG
GDDLSKSPEEKKTATQLHSKRRPKICGPRYGETKEKDIDWGKRCVDKFDIIGIIGEGTYGQVYKARDKDTGEM
VALKKVRLDNEKEGFPITAIREIKILRQLTHQSIINMKEIVTDKEDALDFKKDKGAFYLVFEYMDHDLMGLLE
SGLVHFNENHIKSFMRQLMEGLDYCHKKNFLHRDIKCSNILLNNRGQIKLADFGLARLYSSEESRPYTNKVIT
LWYRPPELLLGEERYTPAIDVWSCGCILGELFTKKPIFQANQELAQLELISRICGSPCPAVWPDVIKLPYFNT
MKPKKQYRRKLREEFVFIPAAALDLFDYMLALDPSKRCTAEQALQCEFLRDVEPSKMPPPDLPLWQDCHELWS
KKRRRQKQMGMTDDVSTIKAPRKDLSLGLDDSRTNTPQGVLPSSQLKSQGSSNVAPVKTGPGQHLNHSELAIL
LNLLQSKTSVNMADFVQVLNIKVNSETQQQLNKINLPAGILATGEKQTDPSTPQQESSKPLGGIQPSSQTIQP
KVETDAAQAAVQSAFAVLLTQLIKAQQSKQKDVLLEERENGSGHEASLQLRPPPEPSTPVSGQDDLIQHQDMR
ILELTPEPDRPRILPPDQRPPEPPEPPPVTEEDLDYRTENQHVPTTSSSLTDPHAGVKAALLQLLAQHQPQDD
PKREGGIDYQAGDTYVSTSDYKDNFGSSSFSSAPYVSNDGLGSSSAPPLERRSFIGNSDIQSLDNYSTASSHS
GGPPQPSAFSESFPSSVAGYGDIYLNAGPMLFSGDKDHRFEYSHGPIAVLANSSDPSTGPESTHPLPAKMHNY
NYGGNLQENPSGPSLMHGQTWTSPAQGPGYSQGYRGHISTSTGRGRGRGLPY*

[0129] An amino acid sequence for the protein encoded by the CDKN2A gene that is a regulator of T cell exhaustion/dysfunction resistance is available from the UniPROT database at accession no. P42771, cDNA NM_000077, with gene location at Chr 9: 21967752-21995301.

(SEQ ID NO: 138)
GAGAGCAGGCAGCGGGCGGCGGGGAGCAGCATGGAGCCGGCGGCGGGGAG
CAGCATGGAGCCTTCGGCTGACTGGCTGGCCACGGCCGCGGCCCGGGGTC
GGGTAGAGGAGGTGCGGGCGCTGCTGGAGGCGGGGGCGCTGCCCAACGCA
CCGAATAGTTACGGTCGGAGGCCGATCCAGGTCATGATGATGGGCAGCGC
CCGAGTGGCGGAGCTGCTGCTGCTCCACGGCGCGGAGCCCAACTGCGCCG
ACCCCGCCACTCTCACCCGACCCGTGCACGACGCTGCCCGGGAGGGCTTC
CTGGACACGCTGGTGGTGCTGCACCGGGCCGGGGCGCGGCTGGACGTGCG
CGATGCCTGGGGCCGTCTGCCCGTGGACCTGGCTGAGGAGCTGGGCCATC
GCGATGTCGCACGGTACCTGCGCGCGGCTGCGGGGGGCACCAGAGGCAGT
AACCATGCCCGCATAGATGCCGCGGAAGGTCCCTCAGACATCCCCGATTG
AAAGAACCAGAGAGGCTCTGAGAAACCTCGGGAAACTTAGATCATCAGTC
ACCGAAGGTCCTACAGGGCCACAACTGCCCCCGCCACAACCCACCCCGCT
TTCGTAGTTTTCATTTAGAAAATAGAGCTTTTAAAAATGTCCTGCCTTTT
AACGTAGATATATGCCTTCCCCCACTACCGTAAATGTCCATTTATATCAT
TTTTTATATATTCTTATAAAAATGTAAAAAAGAAAAACACCGCTTCTGCC
TTTTCACTGTGTTGGAGTTTTCTGGAGTGAGCACTCACGCCCTAAGCGCA
CATTCATGTGGGCATTTCTTGCGAGCCTCGCAGCCTCCGGAAGCTGTCGA
CTTCATGACAAGCATTTTGTGAACTAGGGAAGCTCAGGGGGGTTACTGGC
TTCTCTTGAGTCACACTGCTAGCAAATGGCAGAACCAAAGCTCAAATAAA
AATAAAATAATTTTCATTCATTCACTCA
(SEQ ID NO: 139)
MEPAAGSSMEPSADWLATAAARGRVEEVRALLEAGALPNAPNSYGRRPIQ
VMMMGSARVAELLLLHGAEPNCADPATLTRPVHDAAREGFLDTLVVLHRA
GARLDVRDAWGRLPVDLAEELGHRDVARYLRAAAGGTRGSNHARIDAAEG
PSDIPD*

[0130] An amino acid sequence for the protein encoded by the CFAP54 gene that is a regulator of T cell exhaustion/dysfunction resistance is available from the UniPROT database at accession no. Q96N23, cDNA NM_001367885, with gene location at Chr 12: 96489571-96875555.

(SEQ ID NO: 140)
ACACATACTCCAGGCGGGCCGGGGCGCGTCAATATGGCGGCGCAGGGCTCCCCCTCGAGCTCTCCGTCAGACG
ACTCTACCACCTCGGGGTCTCTGCCAGAACTGCCGCCGACCTCCACCGCGACTTCGAGGTCGCCCCCAGAGTC
GAAGGGGAGCTCCCGGAGCTCGCTGCTTCAGTGGACCTGCCCCGAGGACTCATTGCCCCTAGCCGTGTTTTAT
GGGCCGCTGGACGCGAAAAACCCGCTCCTGGCCTCTTGTGAGAAGGAGATCCAGGAGTTGTTAGGCTTTATGA
GGAAAAAGAAGGCTTTAGCCACCACGGAGGAAGAGAAGCACGAATTCCGCCGGCGTTGTGCCACTTCTTTGTT
TAATATCTGGACTAAATACGCCCCCAGGCTGCCAGCAGACTATTACAACGAAAAGCTTCTGAAGGTTGGAGAT
AGCCTTTGTCAAATGAAAGAATACAAACTGGCCCTTTTACAATGCTATGGAAGATATCTTCAGCAGTTCAATA
CCAATTTTGATGAGAATAAAGTGGATGTAACTCAATTCAAAGCTACCTTTTTCCCAAAAGGCTTTAAAGATAA
AACTGCTGGACTTACATTTCATGCTTTGAGTGGCAAAAATATGTGCAACTACCAGCTGGTCTGCGACAGTGAT
GAAAACCTGAAGAATAAAGAATCTGTGGTCCAGTGTCTGCATATCTTGTCCTCCTTAAGGCTCATCATGCAAG
TGGCTCTGCCACAAGAGCATCTTTGCTGGATTATCTTCAATGGTACCATTTATATTTACACCATTTGCAGAAA
ACTGATGGTCATAGGTCAGTCTTCCAAGGCCTTAGAGTATCTCCTGTGGGCCAGCATGTGTATGGAGTCCTTG
GTCCCGCTCCTGTCACTCAGGTACTTGACATGGCGCGCTACTCTCTACACAGCTGTTTGCCAGTGCTGCTATG
ACTGCCATGCCGGGATTCACGGAGAGGCATTTGCTCGGCGTGCTTTGGCTAAAATTGATGAGTTAAGGCAACT
GGAATTAATGAGTTCCTCAAAATCCCAGGAAGAATCGCGAAGATATTTTCGAGAGGCCACAATGAAGATGGCA
GTGATGATCTTCAAAAGAGGAGTCTTTGAATCTAGAAGAAAAAACAAAGCTGTCTTTAGACCTAAGATAAGAA
TTAACCTAAGGGAAGTACAAACTTTATCATGGCCACGAACTGTCACAGAGCGGCTACTGGATGAGATGTTTGA
TAGCACTGCATCCCAGTTTCTGGCTGTCTTGGAAGCTCTTTCTGATTCAAATAGGCGAATACTGCAAACTGGA
CCCATTGTTACAGATGAAGTGGAGATTCATGATGTTGTCTCAGAATTGTTTATGGCAGGAAAAGAACTTTTGA
TAATGTCAAATATTGGTGCAGATGGAATGCTTGATTTTCCAAAAACATCTCTTCTGGAACTTATGATAGGAAG
AAAAGATGTTATTTCTGTGGATGCTGCTGTGAAATTTATAAAATTAGCTTTTACCTATGAGGAGTGGAGTTTA
TTTGAATCTTCTGCTGTACATCTTATTTATTTTCTCCAGAGGCAGGATGATCCAGAGTCAAAGAAAGCAGAGA
AGGATTTAACTCTTCTGATTGCAATGGAACCACTAATCAACGTGAAGAGAAACAAAGGTTTGATCTTTCCTTT
GGAAAACTATAAAGAAGGACAGTCAACTCAAATTTATTTAAAAAAAATTGCTGTTCATGATACTTGTTTGAAG
ACTTGTGGATATTCAGAGGATATTTTCCATTTGGCAGCAACCTTGTATGTCTGTGTCTGCACTGCTCCCCAGG
ATGTTCAACCTGATAAAGAAATTGTTGTGGACACGATAATGTTCCTATGGCAGAAATGCAAATTAGGAATTCA
GCGGCTCAATATATCCAGAAATGACTATGCAAAATTCACCCAGAAAATCAGTACTAACAAATGGATTTATCTT
CTGTGGCAGATAAATGAAGTAATTCACTGCTATAAAATGGAAGACATTGACATTGTGGTAGTGGCAGAAGTCA
CATTACGGTTAAGTGAAATATTGGAATCTTTAGGAAGCCCAGGAAGAAAATTTAAACAATCTCTAGATGTACC
TTTAAGAGAAGGGACTAACAAATTCCCTGGAGCTCCAAAAGGGATCACAGAAATTCTTCCAATATTACAGAAA
AATCCTGTGGAACAGTTACTTTTTGCTTATAAACTTCTTGACAGAGCAATCGGTGGAATAAATTTGAATTGCA
TGTTAACCTCTTTGCCAAATGGATCATCAGTAATTGACCACTGCTATGCCAAGCGTACCCACCATATAGATGG
AGATACTTACAAACCACTTGCCTCAAATAGTTTCATGATGGATTTGCATCTTGAACTAATTCAAGCTCAGCAT
CGAATAGCTGTTGTGCTTCTGGACAAATTGCAAGTTTTGCAGACTCCAACTGTTAGCAAAGATATTTCTACCA
AGGGTCCGGAAAAGTTAAAACAATCTGGAAGCACTGATTGTTTTACAGAATTAAATATAATGAATAAAATAAA
GAAGAATACATTATCCAAAGCAATTTACTTAATGCAGAAAGCTCTTTTAATATTCGAGAAAGATGCAACTTCT
ACATCTTCATGGGAACTTTTGATGGAAGCATATTCCTTAATTCAGAGGATTGAAGCTGAACAAAATGCCCTAT
ATTCCTATCAGAAATATTTGGAAAGTTCAAAAAGAAAGAAAAGCAGAGTCCCCCCTCCACCTATCCTGCTGTC
TCGAACTCATTGTTCTGTGACACTCAAACCTGCTCCATTTACTTCAGAGGTTAAGGTCTCCTGGTACTGCATT
TTGGGTTGCAAAGCAGAAGGAAGTTATGGAAAAGTACGGCTAAACAATAATCATCTCCCAAATTCAGGAGAAG
CGATACCAGCTGACGGTAAAAGTGTTTTTGAAGTGAAAGGTTTAGAAACCAATGAAAAGTATGTATTTGCAGT
TGCTGCCTATTCTAACAACGGAAAGCTTGTCGGTGGTGCTATTGGGGAGACAACTAAACCAATTCTGGTTTAT
CCCCCTCTTTCTACTATTACTGCTCGGATGTTCCTGACACAGGTTGCCTATCAAGTTGGTAACTATGAATTGG
CTAAGAAAGTTTTCTCACCAGTTTGGGATTATTTTGTTGCTTCGCCACTTCAGGATGAACAATCTGTTATTTG
TTTAAGCAATATAATTACTATTACACAAAGAAGATTACATTCAGATATTTTGGCAGAGACTTCTTCAATCCTC
TTGTACCTTTTTCTTAGAAATATTTTTGTAACAAGTGACATCAAAATTAAAGAAGAAAATCTTTTCTGTGATA
ATATTAAAGGCAATGAGATTTTCCCATCTCAACAAATTGCCAGACTGATTGAATGTGAGAGAGTATTAGTGGC
ATTGGAACTTAGCAACTTCCTAAATGATTCCAGCTATGCCCTTCAAGCTGTGACTCAATGTTATGGACTTCTT
GCTCCCATAATTTATCACAATATTGTTTTGGTACCTGTTGTACAGATCCTGATAAAGTGTATAGTGGTTTTGC
AAGGACTACCAAGTATTGTCTGCTCGAAGAAACATACTGCGAGCTTTGAAAGTATACAACACATGATAGCTTG
TTGTATTTTCTACATAACAAAGATTCTTCGTTCATGGAGGGAATATGACCTGGCAGTAATGATTATAAATTAT
GGGAAAAAAATGTTGGACATCACACCAGGATGCAAGTCTCTGTTTGATGGTAGTAATGAACAAGAAGAAATGC
CAGAGGAGGATTCTTCTAAGAAGTCTTTAAAGACTAAGAAGCCACAGCAGATACTACTGCCTGAAAAGATAAA
TGAACAGCTGGCCTTGTTGGAGACACACCTACTCAAACTGACAAAGCAATATGTTACATCTGAACTCTCAGGA
GGAGAGGACCCTATATTTCTTTATCCTGTAGTTTTGAATTGGTCGGTCAAAGGTGCCGTGAAAGAAGTTATGA
AATTTAAGCAAAAACCAAGATTTCTGGAATTCTTTACACAAGTTATGCTAAAATGCATGAATGAGGAAAAATT
TCATCTTATGGTAGAGGTAACAACTCCTGTCCATGACTTCTTGAAAAGGAGAAATGAGTCTCTACTTGGACTA
ATAAAAGTGAAATATAAGGATAGTGCTTTGAATAAAAAAGCAAACAAATCTTTAAAGTTCAAAGCTGCAGTAA
TGGAAATTGGAAGAAGTGCAGAAATGCAACAAAGAATAAGAAGTAAAAAAAAGGAAACTCTAAGAGATTTCAT
TTTTAAAAATCCGGCTATTTCTGAAATGGTGGCACATGAAAGAAATAGGAGAACCAGTGTTAGGAAAGCAGCA
CAACGATACCTGATGGATTACTTGAATCCTCTAATATTAAGTTATGTTAAAAGAAAGAGGTTCCATCGTCTAT
CACTTGAAGAGATGCCCTGGAGAGCTCAGATGAACCTGTATCTAGCAGGTGCACACTTTAACCTGGTTTTACA
AAAGCTATGGGAGTGTACGAAGATGAAATTTGGCACATCACATATGATGGTCAGTTTCCGATCATGTGATCCT
AACATGTTTTCACTGTATAATTCAGGAACAGTATTACCAACAAGAAAATTGACTGTAGAAAATTATAAAGCAA
TGCTTGATTTCCTTCTTACAGCCAAAAAAAGAAAGGCCAACTTACCATCAGATGCTGAAGAATTTTCTACATT
TATTAATTCCATAATGAGTGATGAAAATATGTCCAAGACACAAACAGTTTATGACTCAGACTCTCAATCAGGT
TCTAGTGCTAAAGAAAAGGACCGAGGAGCAAATTTGTGTGTAATGGATCATTTTATGAAAATCTTTTTATACT
GCAGGAGAGCAATGGTTCTTGCTCATCGTGGTGGCTATTGGACTCTGCTTCAGAACTGCTGTCGGGCCTTATG
GAACTTTACTCAGGAACTACAAATACTTCTTAAACAGGCAGTGGATCTTGATAAAACATTTCCTATTAGCCAA
GATGGTTTCCTCTGCACCTCTGTTTTACCATTCTATTTGGGAGCAGAATTACTTATTGACATGTTAATACAAC
TACAAAATACCAGTTCTATTAAGCCTATTGAAGACAAAGGAGAATTCAGTGTTCCAAGCTGTTATGGGAATAT
TAAAAATGACAACGGTGGTTCTAGTCTTACCTTTGAGCATCCTTTGGATGATGTAAATGTGGTTGATTTGAAA
TGGATCCACGACTTTGTATTAAAATCTCTGGAAGTTTTATATCAAGTGGAAAAATGGGAAACACTAGTATCTC
TTGCCATTCAGTTCAATACAGTTTCACATGAGAGGTATACAGAACAAGTGACACCACTTCTGGTGTATGCACA
GCGCCAGCTTCTGCTGAGAATACAGAAGTTCAAGGGCCCAGATATTACCCAACAACCTTGTGCAAGGTATGAG
GCTGAATATGGAGAGAAGATAACTTGCCGAAATTTCATTGGGAAGCAGCTTAAGATTAATTCTTCAACCATTG
AAGCAACAAGCAACTGCACAGATTTGCTAAAAATGCTTATCTCTTCAGAATACAGCCGAGCCAAAGCGCTTGT
CTGCGTGCCCGTGGACGTGACAGACACCTTGAGGTGTTTTAGAGAGACACTGGAAAAATCCAAATACCATAAC
AGATCAATCCGACACAGCAGAAAGTTGCTTTCATTATTTCTTGCACAGACACAAGATGTTCTCCAAGCCAGCA
ATCAAAGAAGTCTTAAAGTTCAGGCGTTGCATTCACTTGGAAGTCTTCTCATCTTCGCAGAAAAGAAAAGGGC
TGCTTTTAAGTGTTGGTGTCAAGCTCTTGATGACATATTCAGAAAACCAGACGTGCTACACACGTGGAAAGAA
TTTGGCCCCTCACTCACCAATGTCACCAACAGTCATTCACCTCCGGGTTTCAAAGACTACAGTGAGGAGTTTC
TGTCAAGAGTTGGCATCTGGGGGTGTTTGCAAGGAGCAGTCATATCAGCAAAGATAGCACAATTTATTAAGTC
ATTGAATGTTGAAAAGAAAACTGACTGTTGCATTTTGTCTGCGTTACTCTTTCAGGGTTTGCTTAGAACAACA
CTTCCACATCCCAAAGCTGAACGTTGCTATGCTCAATATGAAATCACTCAGCTTCTCCCAGGCATTGAACTCT
TCTCAGATAGATACAGGGCTGACATTTGCTCTGTAATTGCAAGTCTGTATTACATTATACGTGAACTGCACTT
TGTTAGGCAAAACCTAATAGTTCTGCCTCTCCTTGCATTGTATCAATATTTTGTTTCTGGAATTTGTCAAGAC
ATAACAAGAAATCTAGAAGCAAGAATCCTCAAGATAGAAGTCCTTATAGATTTGAGATTCTTTTCTGAAGCCT
TTTATGAGATATCCCAAATTTTCTATGGAAAAAACATGCCTTGTCCAATACCTGCAGGCTATAAAGCCACTGG
AAAAATGAAGATCTTTCAATCATTTGACTCAGGAAAACTTCTTACCAGTAAAGAAAATATACAGGCAATTGAT
GAATTAAGAAATAAAGGCTTGCCTGCAGTTCTGGTTACAATTGGCCAACCACATCTCTTAAATAAGTTTAATT
TTGTTAAAGCATACTTTTTCCTAAGTGTGGCTGCGACAATAAATTGTGTCCCAGAAAATAAATTTAAGACAGT
AATTACCAACAAGAGCAAACCAAACCTACCAAACTTGGAAGAGATATATTCAAAGGATGATGGAAGTTCATTT
TATAATCTTACAAAACTTAAAGATGAGATCACTCTTAGCATGCTAAAGTCGATGTTACTGATGGAAGCTGAGG
ACAGGCTAAACTTCCTTCTGTCCGAGGTGGAACAGAAGACCCTGTCTCAGTGCTCCGCTGGCGAGCTGGAGAT
TGTGGTGGAGGCCCGGCTTCAGCTGGCTGCAGTTGCTCTGCAGAGGCACCGGGCGGCATACAGTGCTGCAATA
GTATTTTCTACACTTACACTTCTCCAGGATTCAAAACTTTTTGAAAAGAAGGTAGTACAGGATGACACAGAGA
ATCCTGTCTCTCCAGGAACTTCTGTCACTGAAAATAAAGATGACAGTGAGTTTTTAGATCCTATTTCCCTAAA
TGCCCGAGAATATTTCAACATTCATCTGTGGTTGAGGTGCCGCTTAGCATTGGTGACTGCATTTGTTGCACAG
ATTCATGGCATTGGAATTGTGAAAGAGGATGATATGACAGATTGCCTGAGCCTCATCAATGAAGTGTGTATGG
AGGCAAAAAGCGCAGGGGACACGGAACTGCAGGCTGAATTCTTGACGCAAGCTGTAATTCTTGGCCTACAAGA
AAAGCATTTAAAGGCAGACATCATGACAAACCTTCAGGATATAATACATTTGCTGGAAGGAAATGAATTTATT
TCTCCTCAATCACGGCTAACCCTGGCAAGAAGCCTAGTTTTGCTGGATGACTTAACCAAAGCTGAGAAATTCA
AGGAATCTCCCTCTTCAAAAACAGGAAAATTAAATTTGTTAACTCGGGCTCATAGCATTCTAACTGAACAGAT
GCTAGCTTTTGGAGAAACAATTGAATTTCGTTCATCAAACACTAAATATGCAAATCCATTACAGCCTTTGAAA
AATATCTATCTTCCCCATGTCATGTTATTGGCCAAAATAAAAATGAGAATTGGACATACAGTGGCCAAGCAAG
TATATTACAAGAATAAAAGGAAGGACCCCTCGAAGTGGTTACCTGCTCTTCATCTGTTTGATGTGGCACTGAA
GCTCTGTAGAACAACAGCAGTGGAGGAACATGAGGTGGAAGCTGAAATCCTTTTTCAGAAAGGCAAAATAGAA
CGTCAAATACTAATGGAAGAGAAATCTCCAAGTTTTCAACTTGAGAGTTTATATGAAGCTATACAACTAAGCC
TGAAAAATGATCAAAACTCAGGATTGATAAGAGACTCCTACCTAGAAATGGCTCTATTGTATTTTCATCTGAA
GAAGCCAAAGATAAAAATTTCAGGATCACCATTAACACTTAAGCCTCCTCTCAGAAGAAGTAGTTCTGTTAAA
GAAACATCAGCAAATAAATTTGAAATGTACAGTTCATTAGCCTGGATTGCAATAAGAGCTGCTGCACAGGTCA
GTGAAGCTGTGCTGGCAATTAACTTACTTATTGGAAAGAAGAATACTAGAATGCATAAAGTTAACCAAGTGGC
ATTACCAAATATCCCAGAATTTGCTGCTCTGGATCTTTTGTCTTCGTATACAGATTATTTGCTTGACAACTAC
CAAGTCCTCTTCCAGACTTCCTGTACATTTTTGTACCAAAATGATGATGTGTGTGACAGCGCAGATGGTAGAA
AAAAGACTCAGACCAAAGTGGATATTACATGGATCCTTCTACTGCGCTACTATATTCACCTTCAGAGGATTAA
TAATCTGAGCAAACTGCTAGCATCTGCAACACCAGTATCTGGAATTTCTTTGCCAGATGATACACTTCTCACA
TCCCTTTACAACTCTGAGTTGATTTTGCGCCAGAAAGAAGTGCATTTTTTCCTTAAAAAATTCTTACAGCTGT
ATTCTTCTTCTTGTATTGATGAATTTCCAAAAGAACTTCTTTGTCAACTGGAAAATCCCCCTCTTTCAGAAAA
AGACTTACGTGAATCATCTGCCAAGTTGTATCGCGATAGTTCTGTACAATCCATTTTATCTTTTAAGCCTGTT
TCAGGCTCATCTTGTGTGGACATAACGCCAATAGAAATGGTAACGCAAGCTTCAAACAAAGAACTTTGCTTTC
AATGGTACATTCCTCCCCTGGATAGACCTCCCAAGGAGACAGAACCTATGGTTTTATTGTTGTATGCATATAA
TTTGAAGCCTCTGAAGATTTCAGATGTTAGACATTCCACTTATAACAGTACATGTGTTGGCTCTTTATGGATT
CCACTGAATAGGGTTATTGCAATTCATGAGAAATTATCTAATCTTGCTCAAATAGCTGAACTATCATTGCCAG
CAGCTCCTGAAATTACCTCAAATGAAAACATATATGAAGTAGAAGTGGAAGAGGAATCAGTTGATAATGAAAT
GGAAGACATGATTATTCAATGTTGCTCTGAAATAGCATCTCTGTTTTTGAATGATAAAGAGCCAACACCACTA
TCTGAGGTCCCATTTGATATCTCACTGCCGTCTATATTCAATCTTGAGAGACTTTTTGATCTGGCTAATGGTT
GCATTTTATCAGGAGGAAGCCTTTTCAACTGGATAGTGTCAATTATTCCCTGAATATCCTATACACGGGATGA
TAAAACTGAGAAATAAATCAAGAGTATGACAACAGACTGAGGAATTTTTCAGCAATATCTGTCAGCCTTTGGA
AATTTGGTGAGAAGAAGTAGTCATGATTCAATGTCTTGCTTGCACAGAAGCCTCTAGTTCAAACTTGGATCTT
GCCCCATCTGATTTCTTATGATATATACAAATACTCTAGATATTGCTTTGAGATTTCGCTGTTGATCAACTGG
CCTGCTGCAGCTTCATAGGTGTTTCAGCTCCCAGTAGGGCAGTTTAACTCCTATCTTCTCTGTGAGTTCCAGG
TCTGTATATCTCCTCAGCTCGCTCTCATTTGTCCAGCTTATCTATTTCTTTATCAAGTTGCTTTGGCTTCCCC
ACTCTCTCCTGCGTTTTGAAAAGAATTAATTCTCAAGTAGATTAAAACTACATTCTGGTAAAAATGA
(SEQ ID NO: 141)
MAAQGSPSSSPSDDSTTSGSLPELPPTSTATSRSPPESKGSSRSSLLQWTCPEDSLPLAVFYGPLDAKNPLLA
SCEKEIQELLGFMRKKKALATTEEEKHEFRRRCATSLFNIWTKYAPRLPADYYNEKLLKVGDSLCQMKEYKLA
LLQCYGRYLQQFNTNFDENKVDVTQFKATFFPKGFKDKTAGLTFHALSGKNMCNYQLVCDSDENLKNKESVVQ
CLHILSSLRLIMQVALPQEHLCWIIFNGTIYIYTICRKLMVIGQSSKALEYLLWASMCMESLVPLLSLRYLTW
RATLYTAVCQCCYDCHAGIHGEAFARRALAKIDELRQLELMSSSKSQEESRRYFREATMKMAVMIFKRGVFES
RRKNKAVFRPKIRINLREVQTLSWPRTVTERLLDEMFDSTASQFLAVLEALSDSNRRILQTGPIVTDEVEIHD
VVSELFMAGKELLIMSNIGADGMLDFPKTSLLELMIGRKDVISVDAAVKFIKLAFTYEEWSLFESSAVHLIYF
LQRQDDPESKKAEKDLTLLIAMEPLINVKRNKGLIFPLENYKEGQSTQIYLKKIAVHDTCLKTCGYSEDIFHL
AATLYVCVCTAPQDVQPDKEIVVDTIMFLWQKCKLGIQRLNISRNDYAKFTQKISTNKWIYLLWQINEVIHCY
KMEDIDIVVVAEVTLRLSEILESLGSPGRKFKQSLDVPLREGTNKFPGAPKGITEILPILQKNPVEQLLFAYK
LLDRAIGGINLNCMLTSLPNGSSVIDHCYAKRTHHIDGDTYKPLASNSFMMDLHLELIQAQHRIAVVLLDKLQ
VLQTPTVSKDISTKGPEKLKQSGSTDCFTELNIMNKIKKNTLSKAIYLMQKALLIFEKDATSTSSWELLMEAY
SLIQRIEAEQNALYSYQKYLESSKRKKSRVPPPPILLSRTHCSVTLKPAPFTSEVKVSWYCILGCKAEGSYGK
VRLNNNHLPNSGEAIPADGKSVFEVKGLETNEKYVFAVAAYSNNGKLVGGAIGETTKPILVYPPLSTITARMF
LTQVAYQVGNYELAKKVFSPVWDYFVASPLQDEQSVICLSNIITITQRRLHSDILAETSSILLYLFLRNIFVT
SDIKIKEENLFCDNIKGNEIFPSQQIARLIECERVLVALELSNFLNDSSYALQAVTQCYGLLAPIIYHNIVLV
PVVQILIKCIVVLQGLPSIVCSKKHTASFESIQHMIACCIFYITKILRSWREYDLAVMIINYGKKMLDITPGC
KSLFDGSNEQEEMPEEDSSKKSLKTKKPQQILLPEKINEQLALLETHLLKLTKQYVTSELSGGEDPIFLYPVV
LNWSVKGAVKEVMKFKQKPRFLEFFTQVMLKCMNEEKFHLMVEVTTPVHDFLKRRNESLLGLIKVKYKDSALN
KKANKSLKFKAAVMEIGRSAEMQQRIRSKKKETLRDFIFKNPAISEMVAHERNRRTSVRKAAQRYLMDYLNPL
ILSYVKRKRFHRLSLEEMPWRAQMNLYLAGAHFNLVLQKLWECTKMKFGTSHMMVSFRSCDPNMFSLYNSGTV
LPTRKLTVENYKAMLDFLLTAKKRKANLPSDAEEFSTFINSIMSDENMSKTQTVYDSDSQSGSSAKEKDRGAN
LCVMDHFMKIFLYCRRAMVLAHRGGYWTLLQNCCRALWNFTQELQILLKQAVDLDKTFPISQDGFLCTSVLPF
YLGAELLIDMLIQLQNTSSIKPIEDKGEFSVPSCYGNIKNDNGGSSLTFEHPLDDVNVVDLKWIHDFVLKSLE
VLYQVEKWETLVSLAIQFNTVSHERYTEQVTPLLVYAQRQLLLRIQKFKGPDITQQPCARYEAEYGEKITCRN
FIGKQLKINSSTIEATSNCTDLLKMLISSEYSRAKALVCVPVDVTDTLRCFRETLEKSKYHNRSIRHSRKLLS
LFLAQTQDVLQASNQRSLKVQALHSLGSLLIFAEKKRAAFKCWCQALDDIFRKPDVLHTWKEFGPSLTNVTNS
HSPPGFKDYSEEFLSRVGIWGCLQGAVISAKIAQFIKSLNVEKKTDCCILSALLFQGLLRTTLPHPKAERCYA
QYEITQLLPGIELFSDRYRADICSVIASLYYIIRELHFVRQNLIVLPLLALYQYFVSGICQDITRNLEARILK
IEVLIDLRFFSEAFYEISQIFYGKNMPCPIPAGYKATGKMKIFQSFDSGKLLTSKENIQAIDELRNKGLPAVL
VTIGQPHLLNKFNFVKAYFFLSVAATINCVPENKFKTVITNKSKPNLPNLEEIYSKDDGSSFYNLTKLKDEIT
LSMLKSMLLMEAEDRLNFLLSEVEQKTLSQCSAGELEIVVEARLQLAAVALQRHRAAYSAAIVFSTLTLLQDS
KLFEKKVVQDDTENPVSPGTSVTENKDDSEFLDPISLNAREYFNIHLWLRCRLALVTAFVAQIHGIGIVKEDD
MTDCLSLINEVCMEAKSAGDTELQAEFLTQAVILGLQEKHLKADIMTNLQDIIHLLEGNEFISPQSRLTLARS
LVLLDDLTKAEKFKESPSSKTGKLNLLTRAHSILTEQMLAFGETIEFRSSNTKYANPLQPLKNIYLPHVMLLA
KIKMRIGHTVAKQVYYKNKRKDPSKWLPALHLFDVALKLCRTTAVEEHEVEAEILFQKGKIERQILMEEKSPS
FQLESLYEAIQLSLKNDQNSGLIRDSYLEMALLYFHLKKPKIKISGSPLTLKPPLRRSSSVKETSANKFEMYS
SLAWIAIRAAAQVSEAVLAINLLIGKKNTRMHKVNQVALPNIPEFAALDLLSSYTDYLLDNYQVLFQTSCTFL
YQNDDVCDSADGRKKTQTKVDITWILLLRYYIHLQRINNLSKLLASATPVSGISLPDDTLLTSLYNSELILRQ
KEVHFFLKKFLQLYSSSCIDEFPKELLCQLENPPLSEKDLRESSAKLYRDSSVQSILSFKPVSGSSCVDITPI
EMVTQASNKELCFQWYIPPLDRPPKETEPMVLLLYAYNLKPLKISDVRHSTYNSTCVGSLWIPLNRVIAIHEK
LSNLAQIAELSLPAAPEITSNENIYEVEVEEESVDNEMEDMIIQCCSEIASLFLNDKEPTPLSEVPFDISLPS
IFNLERLFDLANGCILSGGSLFNWIVSIIP*

[0131] An amino acid sequence for the protein encoded by the CISH gene that is a regulator of T cell exhaustion/dysfunction resistance is available from the UniPROT database at accession no. Q9NSE2, cDNA NM_013324, with gene location at Chr 3: 50606489-50611774.

(SEQ ID NO: 142)
TCCCTGTCCTGCGCCCGCGCGCCCCGGGAGCCTACCCAGCACGCGCTCCG
CGCCCACTGGTTCCCTCCAGCCGCCGCCGTCCAGCCGAGTCCCCACTCCG
GAGTCGCCGCTGCCGCGGGGACATGGTCCTCTGCGTTCAGGGGTGAGCAC
CCCCTTGTAAGCTCAGGGCTACTGTTGGGTGTCAGGGAACAAAGTTTTAG
ACTGCTGCGCTCCAAAGCGGGCACACACATGTACCTAGAACACACCAGCC
ACTGTCCCCACCATGATGATGACACAGCCATGGACACACCCCTGCCCAGA
CCTCGTCCTTTGCTGGCTGTGGAGCGGACTGGGCAGCGGCCCCTGTGGGC
CCCGTCCCTGGAACTGCCCAAGCCAGTCATGCAGCCCTTGCCTGCTGGGG
CCTTCCTCGAGGAGGTGGCAGAGGGTACCCCAGCCCAGACAGAGAGTGAG
CCAAAGGTGCTGGACCCAGAGGAGGATCTGCTGTGCATAGCCAAGACCTT
CTCCTACCTTCGGGAATCTGGCTGGTATTGGGGTTCCATTACGGCCAGCG
AGGCCCGACAACACCTGCAGAAGATGCCAGAAGGCACGTTCTTAGTACGT
GACAGCACGCACCCCAGCTACCTGTTCACGCTGTCAGTGAAAACCACTCG
TGGCCCCACCAATGTACGCATTGAGTATGCCGACTCCAGCTTCCGTCTGG
ACTCCAACTGCTTGTCCAGGCCACGCATCCTGGCCTTTCCGGATGTGGTC
AGCCTTGTGCAGCACTATGTGGCCTCCTGCACTGCTGATACCCGAAGCGA
CAGCCCCGATCCTGCTCCCACCCCGGCCCTGCCTATGCCTAAGGAGGATG
CGCCTAGTGACCCAGCACTGCCTGCTCCTCCACCAGCCACTGCTGTACAC
CTAAAACTGGTGCAGCCCTTTGTACGCAGAAGCAGTGCCCGCAGCCTGCA
ACACCTGTGCCGCCTTGTCATCAACCGTCTGGTGGCCGACGTGGACTGCC
TGCCACTGCCCCGGCGCATGGCCGACTACCTCCGACAGTACCCCTTCCAG
CTCTGACTGTACGGGGCAATCTGCCCACCCTCACCCAGTCGCACCCTGGA
GGGGACATCAGCCCCAGCTGGACTTGGGCCCCCACTGTCCCTCCTCCAGG
CATCCTGGTGCCTGCATACCTCTGGCAGCTGGCCCAGGAAGAGCCAGCAA
GAGCAAGGCATGGGAGAGGGGAGGTGTCACACAACTTGGAGGTAAATGCC
CCCAGGCCGCATGTGGCTTCATTATACTGAGCCATGTGTCAGAGGATGGG
GAGACAGGCAGGACCTTGTCTCACCTGTGGGCTGGGCCCAGACCTCCACT
CGCTTGCCTGCCCTGGCCACCTGAACTGTATGGGCACTCTCAGCCCTGGT
TTTTCAATCCCCAGGGTCGGGTAGGACCCCTACTGGCAGCCAGCCTCTGT
TTCTGGGAGGATGACATGCAGAGGAACTGAGATCGACAGTGACTAGTGAC
CCCTTGTTGAGGGGTAAGCCAGGCTAGGGGACTGCACAATTATACACTAT
TTATTTATTTATTCTCCTTGGGGTTGGTGTCAGGGGCGAGCCAACCCCAC
CTCTATGCCCTGAGCCCTGGTAGTCCAGAGACCCCAACTCTGCCCTGGCT
TCTCTGGTTCTTCCCTGTGGAAAGCCCATCCTGAGACATCTTGCTGGAAC
CAAGGCAATCCTGGATGTCCTGGTACTGACCCACCCGTCTGTGAATGTGT
CCACTCTCTTCTGCCCCCAGCCATATTTGGGGAGGATGGACAACTACAAT
AGGTAAGAAAATGCAGCCGGAGCCTCAGTCCCCAGCAGAGCCTGTGTCTC
ACCCCCTCACAGGACAGAGCTGTATCTGCATAGAGCTGGTCTCACTGTGG
CGCAGGCCCCGGGGGGAGTGCCTGTGCTGTCAGGAAGAGGGGGTGCTGGT
TTGAGGGCCGCCACTGCAGTTCTGCTAGGTCTGCTTCCTGCCCAGGAAGG
TGCCTGCACATGAGAGGAGAGAAATACACGTCTGATAAGACTTCATGAAA
TAATAATTATAGCAAAGAACAGTTTGGTGGTCTTTTCTCTTCCACTGATT
TTTCTGTAATGACATTATACCTTTATTACCTCTTTATTTTATTACCTCTA
TAATAAAATGATACCTT
(SEQ ID NO: 143)
MYLEHTSHCPHHDDDTAMDTPLPRPRPLLAVERTGQRPLWAPSLELPKPV
MQPLPAGAFLEEVAEGTPAQTESEPKVLDPEEDLLCIAKTFSYLRESGWY
WGSITASEARQHLQKMPEGTFLVRDSTHPSYLFTLSVKTTRGPTNVRIEY
ADSSFRLDSNCLSRPRILAFPDVVSLVQHYVASCTADTRSDSPDPAPTPA
LPMPKEDAPSDPALPAPPPATAVHLKLVQPFVRRSSARSLQHLCRLVINR
LVADVDCLPLPRRMADYLRQYPFQL*

[0132] An amino acid sequence for the protein encoded by the COPS7B gene that is a regulator of T cell exhaustion/dysfunction resistance is available from the UniPROT database at accession no. Q9H9Q2, cDNA NM_001282949, with gene location at Chr 2: 231781671-231809254.

(SEQ ID NO: 144)
ATCCCCTGCACTCGGTTCCTCTGTAACTTAGACTCCAGTGTGCCGCGCAG
TGTGCGCAAATTCACAAACCCGCCCGCTGAGTTGGTCGTTTCGGAATCCC
GAGACTTGAAACCCAACGGGAAGACCCTTCTCACCCTCAAAAGAAGATGA
CAGCCCGCAGAGAGTTAACTTCTGTTTACATGGAACTCAGACATCTGCAA
ATCATGCTTGCGGAAGGAGCTAATGCTGCTTATTTGCAGTTGTTGAACCT
GTTTGCCTATGGGACATACCCAGATTACATAGCCAACAAGGAGAGCCTGC
CAGAACTGAGCACAGCTCAGCAGAACAAGCTGAAGCATCTTACCATCGTG
AGCTTGGCATCAAGAATGAAGTGTATCCCCTACTCCGTGTTGCTGAAAGA
CCTGGAGATGCGGAATCTCCGGGAACTAGAAGACCTTATCATTGAGGCTG
TCTACACTGACATCATCCAGGGCAAGCTGGACCAGCGAAACCAGCTGCTG
GAAGTGGATTTCTGCATTGGCCGTGACATCCGAAAGAAGGATATCAATAA
TATTGTCAAGACCCTGCATGAATGGTGTGATGGCTGTGAAGCAGTTCTAC
TGGGCATCGAGCAGCAAGTTCTGAGAGCCAACCAGTACAAAGAGAACCAC
AACCGAACTCAGCAGCAGGTAGAAGCAGAGGTTACCAACATCAAGAAGAC
ACTCAAAGCCACCGCATCCTCCTCGGCTCAGGAGATGGAGCAGCAGCTGG
CTGAACGGGAGTGTCCCCCTCACGCTGAGCAGAGGCAGCCCACCAAGAAG
ATGTCCAAAGTGAAAGGTCTGGTCTCCAGCCGCCACTAGGGCCGGCTGGG
GCAGCTGGCACTCACCAGGCCTGGGTCAGGTGGGGAGGGGACACCAAGGG
CCCATTTCCTCCCCTCTCTACCTGCAGTGAGTTCCAGACCTGCCCGTCCC
CTCACCAGCGCCTCCCCACCCTGTTGGTACTGTTCCAGAAAAACTGTTAC
TCCCCCTCA
(SEQ ID NO: 145)
MAGEQKPSSNLLEQFILLAKGTSGSALTALISQVLEAPGVYVFGELLELA
NVQELAEGANAAYLQLLNLFAYGTYPDYIANKESLPELSTAQQNKLKHLT
IVSLASRMKCIPYSVLLKDLEMRNLRELEDLIIEAVYTDIIQGKLDQRNQ
LLEVDFCIGRDIRKKDINNIVKTLHEWCDGCEAVLLGIEQQVLRANQYKE
NHNRTQQQVEAEVTNIKKTLKATASSSAQEMEQQLAERECPPHAEQRQPT
KKMSKVKGLVSSRH*

[0133] An amino acid sequence for the protein encoded by the CPSF4L gene that is a regulator of T cell exhaustion/dysfunction resistance is available from the UniPROT database at accession no. A6NMK7, cDNA NM_001129885, with gene location at Chr 17: 73248449-73262352.

(SEQ ID NO: 146)
GCTATATTGGGCCCACCTGCCTGGGTTCCAGCAGCTTCCGCAGCCCCAGC
AGGAGACGGAAGATGCAAGAGGTCATTGCGGGGCTAGAGCGGTTCACCTT
TGCCTTCGAGAAGGATGTCGAGATGCAGAAGGGCACTGGGCTCCTGCCTT
TCCAGGGCATGGACAAGTCGGCCTCAGCTGTGTGCAACTTCTTCACTAAA
GGGCTCTGTGAGAAAGGGAAACTCTGCCCCTTCCGACATGACCGAGGGGA
GAAGATGGTGGTATGCAAGCACTGGCTCCGGGGGCTCTGCAAGAAGGGTG
ATCACTGCAAGTTCCTGCACCAGTATGACCTCACCAGGATGCCTGAGTGC
TACTTCTACTCCAAGTTTGGTGACTGCAGCAACAAGGAGTGTTCCTTCCT
CCATGTGAAGCCAGCTTTCAAGTCCCAGGACTGTCCTTGGTATGACCAAG
GTTTCTGCAAGGACGGTCCTCTGTGTAAATACCGCCATGTCCCCAGAATA
ATGTGTCTCAACTATTTAGTTGGCTTCTGCCCCGAGGGACCCAAGTGCCA
ATTTGCTCAGAAGATTCGGGAATTCAAGCTGCTGCCTGGAAGCAAGATCT
AAGCGTTGCTTCTTACCTAGCGGGGCACTCCAATGCCACAGACAGGG
(SEQ ID NO: 147)
MQEVIAGLERFTFAFEKDVEMQKGTGLLPFQGMDKSASAVCNFFTKGLCE
KGKLCPFRHDRGEKMVVCKHWLRGLCKKGDHCKFLHQYDLTRMPECYFYS
KFGDCSNKECSFLHVKPAFKSQDCPWYDQGFCKDGPLCKYRHVPRIMCLN
YLVGFCPEGPKCQFAQKIREFKLLPGSKI*

[0134] An amino acid sequence for the protein encoded by the CUL5 gene that is a regulator of 55 T cell exhaustion/dysfunction resistance is available from the UniPROT database at accession no. Q93034, cDNA NM_003478, with gene location at Chr 11: 108008898-108107761.

(SEQ ID NO: 148)
GCGCGTCCCCGCCCTCGCGTCACGTGACGTGGCCGCGGAACCTGAGCTGCGGGGCCTAAGCCGAGCTAAATTC
GTTGCAGGTGGCCGCGGCGGGTGCAACCACAAAGGCTAATCCGAAGGAGTCGGGGAGGCTCGTGGAGTCGATG
CTTCCTCTTCCAAGTCAGGTCGGCTCCCGTTACCTTCTCAGCATTCGCCGTTCCGGTCTTCCTGAGCGCGTGC
ATGAGGTCTTTCGCGTGGGGAAGCTCCGGTGACCATGTAGGGGAGAAGAGTGAGGAAGCTCCTGGTGCTTGGG
ACGAGGTCAGCGCTGTCGGCGCGCTGCTCCAGCGCCCACCACACCCTGGTGCGGGCCGACGGGCCCTGGGCCC
TGGTGGGAGCTCCGGCCTCCGGTCAAGGCCTGGCCGGGAGCGCCACGAATTCTCGCGTCGTCTCGCGAGAGTC
CAAGTTAAAGAACATGGCGACGTCTAATCTGTTAAAGAATAAAGGTTCTCTTCAGTTTGAAGACAAATGGGAT
TTTATGCGCCCGATTGTTTTGAAGCTTTTACGCCAGGAATCTGTTACAAAACAGCAGTGGTTTGATCTGTTTT
CGGATGTGCATGCAGTCTGTCTTTGGGATGATAAAGGCCCAGCAAAAATTCATCAGGCTTTAAAAGAAGATAT
TCTTGAGTTTATTAAGCAAGCACAGGCACGAGTACTGAGCCATCAAGATGATACGGCTTTGCTAAAAGCATAT
ATTGTTGAATGGCGAAAGTTCTTTACACAATGTGATATTTTACCAAAACCTTTTTGTCAACTAGAGATTACTT
TAATGGGTAAACAGGGCAGCAATAAAAAATCAAATGTGGAAGACAGTATTGTTCGAAAGCTTATGCTTGATAC
ATGGAATGAGTCAATCTTTTCAAACATAAAAAACAGACTCCAAGATAGTGCAATGAAGCTGGTACATGCTGAG
AGATTGGGAGAAGCTTTTGATTCTCAGCTGGTTATTGGAGTAAGAGAATCCTATGTTAACCTTTGTTCTAATC
CTGAGGATAAACTTCAAATTTATAGGGACAATTTTGAGAAGGCATACTTGGATTCAACAGAGAGATTTTATAG
AACACAAGCACCCTCGTATTTACAACAAAATGGTGTACAGAATTATATGAAATATGCAGATGCTAAATTAAAA
GAAGAAGAAAAACGAGCACTACGTTATTTAGAAACAAGACGAGAATGTAACTCCGTTGAAGCACTCATGGAAT
GCTGTGTAAATGCCCTGGTGACATCATTTAAAGAGACTATCTTAGCTGAGTGCCAAGGCATGATCAAGAGAAA
TGAAACTGAAAAATTACATTTAATGTTTTCATTGATGGACAAAGTTCCTAATGGTATAGAGCCAATGTTGAAA
GACTTGGAGGAACATATCATTAGTGCTGGCCTGGCAGATATGGTAGCAGCTGCTGAAACTATTACTACTGACT
CTGAGAAATACGTTGAGCAGTTACTTACACTATTTAATAGATTTAGTAAACTCGTCAAAGAAGCTTTTCAAGA
TGATCCACGATTTCTTACTGCAAGAGATAAGGCGTATAAAGCAGTTGTTAATGATGCTACCATATTTAAACTT
GAATTACCTTTGAAGCAGAAGGGGGTGGGATTAAAAACTCAGCCTGAATCAAAATGCCCTGAGCTGCTTGCCA
ATTACTGTGACATGTTGCTAAGAAAAACACCATTAAGCAAAAAACTAACCTCTGAAGAGATTGAAGCAAAGCT
TAAAGAAGTGCTCTTGGTACTTAAGTATGTACAGAACAAAGATGTTTTTATGAGGTATCATAAAGCTCATTTG
ACACGACGTCTTATATTAGACATCTCTGCCGATAGTGAAATTGAAGAAAACATGGTAGAGTGGCTAAGAGAAG
TTGGTATGCCAGCGGATTATGTAAACAAGCTTGCTAGAATGTTTCAGGACATAAAAGTATCTGAAGATTTGAA
CCAAGCTTTTAAGGAAATGCACAAAAATAATAAATTGGCATTACCAGCTGATTCAGTTAATATAAAAATTCTG
AATGCTGGCGCCTGGTCAAGAAGTTCTGAGAAAGTCTTTGTCTCACTTCCTACTGAACTGGAGGACTTGATAC
CGGAAGTAGAAGAATTCTACAAAAAAAATCATAGTGGTAGAAAATTACATTGGCATCATCTCATGTCAAATGG
AATTATAACATTTAAGAATGAAGTTGGTCAATATGATTTGGAGGTAACCACGTTTCAGCTCGCTGTATTGTTT
GCATGGAACCAAAGACCCAGAGAGAAAATCAGCTTTGAAAATCTTAAGCTTGCAACTGAACTCCCTGATGCTG
AACTTAGGAGGACTTTATGGTCTTTAGTAGCTTTCCCAAAACTCAAACGGCAAGTTTTGTTGTATGAACCTCA
AGTCAACTCACCCAAAGACTTTACAGAAGGTACCCTCTTCTCAGTGAACCAGGAGTTCAGTTTAATAAAAAAT
GCAAAGGTTCAGAAAAGGGGTAAAATCAACTTGATTGGACGTTTGCAGCTCACTACAGAAAGGATGAGAGAAG
AAGAGAATGAAGGAATAGTTCAACTACGAATACTAAGAACCCAGGAAGCTATCATACAAATAATGAAAATGAG
AAAGAAAATTAGTAATGCTCAGCTGCAGACTGAATTAGTAGAAATTTTGAAAAACATGTTCTTGCCACAAAAG
AAAATGATAAAAGAGCAAATAGAGTGGCTAATAGAGCACAAATACATCAGAAGAGATGAATCTGATATCAACA
CTTTCATATATATGGCATAATTTTGAATATCATGGACAATATTTAGAACCCAAATTTTGGAGTGCTTGGGCAG
AAAGTTGTAAAGTTTGTGCTGGAGAAAGGTTTATTTGGACTTTGATTACATAAATATTAAAATCTCTGCCTTA
CCTTACAAAAACAACTATATTTTGCCAATCACATTAGTTAGCATGATGGCATTCCCTTCATGTTGCACACTCT
TTGACAGCATGCTGTTTTGTGGAGAAACTTGCATTCATGAAGAGCCCATTATCAACTTTTAAAAGTGAATTTG
ATTTGTACCCACCAGGAGAAATACAGTTGGGAAGGGTGAGGGTGGGGTTCTTGTTGCTTTTTTCTCTTTTTTC
CTCTCTTAAAAAATGTACTTGCACAAGGAAGGATCTTCAGATATTCATGCACTGAAAAATGCTGTTATCTTTT
GTTTTTAAAAAATGCAATTAAAACTAGAAATAGCACTCTTGGTTTCTTTTGATGAAAAGAGTGAGCTGGTCAA
TGCAACATTGGGAAACGGCAGATGTAGGTGAGAAGTTAAGTATTTAATAGTATCAAATTGTTCAAACATTGCT
CAGTATAATAACTGGATTTTAATGGTGACCTAAAAATGGTATTAAATATTTTCAACTTTCAAATGTTGGTTTT
CTTTAAGCAGGAGACTGCTATTTTAGTTGTTGTTAAATGATGAGGAGTTTTTTTTTTTTTAAATATGGCTGGA
AAGCTTGTTTTGAAAAATGAAGCTTATATTAATTGTTGCTTCAATAGTTTAAAAAATTTATGGAGATAGGTAG
GTCATTATGATTGCAGAGCCAAAATAGCAAAACAAACATATTAAGTGTGTTTACTAAACATATTGTGTGTTTA
CTAACACACTTAATGTTTATATACCTAATATTTATTATGCCATATCTGAATTTATTAAAAACAACACAGAAAT
CTCCTGCTCTGATATAGTTATGTAACTGATCTCTTAATCTGTAGCATAGAAGTATTTTGGTATTTTAAGGTCT
CATGATTAGGGATTTGTAGCCTCAGGTTTGAATCAGTCACCTAGGGGTAAGAGAAAAACCACAACATAAGACC
TGAAAAACAGAAGCAAAATTGTTGCACTCTTAATACGAGCAGTAAACTTGCCAAATATATGTACATATATATT
TATATATTTTAAAAATAAACATTTTTTAAATCGTCAGAAGGCAACATTTACCATGTTCCTTTCAGTCTATCCA
AAGTAGCAACTTAACTAGTTGCTGGCAACTGAATACCCAGAGTAGTGGAAATTTTAGGACTTGAGGACGTGAA
CAACTTGAAAGAGAAAATTGATTCCCCTTGAGGAAAGAATGGCTCAACGTGGATTTTTATTCATTGTGGTGCA
CGTTTCAAATTTTCTTGCAAATTATTTTATATCTTATTTGATGTTAAGTAATATTTTTAAAGTATGGTTTTTG
AAGATAGTAGGAAATGGAGTACAGAAAGGCATACAGTATTATGTTACAGTGGAGTGCTTTCAAGAGCATTTCG
TAGGATCTGTCCCCATCCGAAGAGGCTTTGTGAACTGCCTGCTGAATGGAAGGAAAGCAACTTTAAAACATTT
AGAGTTTTGCTGAGTATAGCCAAATGCCTGTTCTGAAACTTATAGGAAATTGGAATTTTGTTTAAAATTTTAC
ACTTTAAGGTAGCAAATGTCAATTATTAGACCGAGCATATTGTGAAGAATTAAACTAAAATTAATACGTACAG
TTTTCTCTAATTAGGTGACTGTTCATAATGGGTATATTTGGAATTTAGAAGAAATAATTTTGTAGTAATTGTG
GCCCTTATGTTTAACAGATAATTCAGCATTGGCGTATTTGCTTGTCCCAATACAAGAATGCCAAAGGAGGAAA
CAGGAAAAATTGCCGTCCATTTTAAAAATTTAGGTTTGTTGTTTTAAACCATAATTGTTCTCAGAACTTTTTT
GGAACTTCTAATTTTGGGTCATTTAATTTAAGAATGAGAGTCATGATGTTTTGATTTATGAAGGTGAATTTAA
TGCAAAAGTGGGTAACACTACATTCATAGCAAAGTTTTTTATTAAATTTTATAAATTTTTAATAGCCAATTAT
GTCCTAATTGTATTTTGGGGAATGAACAGCAGCAAATACTGTAAATGTACAGTTTTCTTTTTTTTTTTTTTTT
GGTTATGTATACAAAAGTTTTAACTACTTTTTGGTGTTTATGAAAATCATTTAGTTGACAAGGTGCCTATGCC
ATTGTTAAATTTTCTTTAAGTAATTTAACAACAGATTTGCTAATTTAAAAAAAAATGAAAAAAAAAATCTTAC
CAGCAGTTTGTAAAGGTCTGGAATCACAGTTGGCATCCTTTATTCAGGTCTCTTCTCTCCAGCGTACACTTAA
AATTGGTGCCGAGCAGGGATATAACCTGCAGTTAAGTGAAAAGAAAATCCAGCCTCCCCCTCCAAAAAAAAAA
AAAAAATTTAATTTTTAAAAATTAGTGGTATGGCAATAAGACACTTCAGAGGCTATCTTAACCTCTGAATACC
CATCTTCTAGTTTAAAGACAGAGACATCCCATCTGGAAAATGTTAACTTGTGTTGCCATCTCGTTGCCGGAGT
AAGTAGACATAAGACAGAGTTTAAGAAGTAAAAATATAGAAAAATTTTGATGGTCACAATGAGATAAATATTA
GAATATTACTATTCCAATGATTAAATGAGGATCTTGAAATAAATTCTGAAGTCTTCCAATTTTTACATTTATT
GGAGGGGTCCCTGAGTTCTGTCAACTTTTTTATTTAAGTCTCTTGCTCTTATTTTGTGCATAAATGTTAAACC
TTCCAAAAATGAAATGTTAGCTTTCTTTCTTTTACTTTTTATTAAATTTAATAGAAAATATGACCTGAGTAGT
TAAAAAGTATTTTGCATTATTTGCAGTAAGATGTCTCTAGCACTGCTCAAAGGGCAAATTTTAAAACTTCAGT
CTGGGTGAAAGATTTGCTAGTTTTACAGAAAGATTTGCTATCTTAAACTCAAGCTGGTTTTTCTGTTCTCATG
TAAGTGACTGGGATGCTGTCTTATGAATTCTTCCAAGGTCATGTTTGTGAAATAAACATTACATGAGAGCTTT
CCTGTCATCTACACTATATGTTGTCTGGAGTGTTGAACAAATTTATTTTAGTTTCTAAGTTGTAATCTATCCT
CATATGGTCTATACGATTTTGAATGTGTGCCACTACATACTGAGATGATAATGCTGTACAATTTTAAGTGGTA
GCAGTTTCTGTATGCAGTAGGCTGAAATATTTTGATGAACTGCTTAATTTTTGGATTTTATTTTTTAAGTTGT
ATAATTTATTTTCTTGCAAAATAAAAATGTAATATAAAA
(SEQ ID NO: 149)
MATSNLLKNKGSLQFEDKWDFMRPIVLKLLRQESVTKQQWFDLFSDVHAVCLWDDKGPAKIHQALKEDILEFI
KQAQARVLSHQDDTALLKAYIVEWRKFFTQCDILPKPFCQLEITLMGKQGSNKKSNVEDSIVRKLMLDTWNES
IFSNIKNRLQDSAMKLVHAERLGEAFDSQLVIGVRESYVNLCSNPEDKLQIYRDNFEKAYLDSTERFYRTQAP
SYLQQNGVQNYMKYADAKLKEEEKRALRYLETRRECNSVEALMECCVNALVTSFKETILAECQGMIKRNETEK
LHLMFSLMDKVPNGIEPMLKDLEEHIISAGLADMVAAAETITTDSEKYVEQLLTLFNRFSKLVKEAFQDDPRF
LTARDKAYKAVVNDATIFKLELPLKQKGVGLKTQPESKCPELLANYCDMLLRKTPLSKKLTSEEIEAKLKEVL
LVLKYVQNKDVFMRYHKAHLTRRLILDISADSEIEENMVEWLREVGMPADYVNKLARMFQDIKVSEDLNQAFK
EMHKNNKLALPADSVNIKILNAGAWSRSSEKVFVSLPTELEDLIPEVEEFYKKNHSGRKLHWHHLMSNGIITF
KNEVGQYDLEVTTFQLAVLFAWNQRPREKISFENLKLATELPDAELRRTLWSLVAFPKLKRQVLLYEPQVNSP
KDFTEGTLFSVNQEFSLIKNAKVQKRGKINLIGRLQLTTERMREEENEGIVQLRILRTQEAIIQIMKMRKKIS
NAQLQTELVEILKNMFLPQKKMIKEQIEWLIEHKYIRRDESDINTFIYMA*

[0135] An amino acid sequence for the protein encoded by the CUTA gene that is a regulator of T cell exhaustion/dysfunction resistance is available from the UniPROT database at accession no. O60888, cDNA NM_001014433, with gene location at Chr 6: 33416442-33418317.

(SEQ ID NO: 150)
CAGCCAGCAAGTGGCAGTTTCGGGTTCACACGGAAACGGGCGTGCCATTT
CCGCGCACGTCTGCAGATGCGGTAGTCGATTGGTCAAGTCTCCCATGGCT
CCTCCTTCATCAGGAGGTGGGCAAACCGCGCCATGATAGGGTCGGGATTG
GCTGGCTCTGGAGGCGCAGGTGGTCCTTCTTCTACTGTCACATGGTGCGC
GCTGTTTTCTAATCACGTGGCTGCCACCCAGGCCTCTCTGCTCCTGTCTT
TTGTTTGGATGCCGGCGCTGCTGCCTGTGGCCTCCCGCCTTTTGTTGCTA
CCCCGAGTCTTGCTGACCATGGCCTCTGGAAGCCCTCCGACCCAGCCCTC
GCCGGCCTCGGATTCCGGCTCTGGCTACGTTCCGGGCTCGGTCTCTGCAG
CCTTTGTTACTTGCCCCAACGAGAAGGTCGCCAAGGAGATCGCCAGGGCC
GTGGTGGAGAAGCGCCTAGCAGCCTGCGTCAACCTCATCCCTCAGATTAC
ATCCATCTATGAGTGGAAAGGGAAGATCGAGGAAGACAGTGAGGTGCTGA
TGATGATTAAAACCCAAAGTTCCTTGGTCCCAGCTTTGACAGATTTTGTT
CGTTCTGTGCACCCTTACGAAGTGGCCGAGGTAATTGCATTGCCTGTGGA
ACAGGGGAACTTTCCGTACCTGCAGTGGGTGCGCCAGGTCACAGAGTCAG
TTTCTGACTCTATCACAGTCCTGCCATGATGAGCCCTGTTCCTGCTCATC
ATGAAGATCCCCGCGATACTTCAACGCCTTCTGACTTCCAGGTGATGACT
GGGCCCCCAATAAATCCCGTCTTTGGGTCTCTCTGCCTTTTGCCTGTTTT
TTGTCATGTATGCAAATTTGTTGGGAGAATATAAGTGCTTCTAGTCCCTG
TATTCTCTACATCTTTCAGAATGACTCAGAGCTGCTA
(SEQ ID NO: 151)
MPALLPVASRLLLLPRVLLTMASGSPPTQPSPASDSGSGYVPGSVSAAFV
TCPNEKVAKEIARAVVEKRLAACVNLIPQITSIYEWKGKIEEDSEVLMMI
KTQSSLVPALTDFVRSVHPYEVAEVIALPVEQGNFPYLQWVRQVTESVSD
SITVLP*

[0136] An amino acid sequence for the protein encoded by the DCUN1D3 gene that is a regulator of T cell exhaustion/dysfunction resistance is available from the UniPROT database at accession no. Q8IWE4, cDNA NM_173475, with gene location at Chr 16: 20854925-20900358.

(SEQ ID NO: 152)
AGATGAAGAGGAGGCGGTGGCAGTGGTGGAAGAAGAGGCGGCGGCGGCGGGGGTAGGGAGCCTGGAAACGCGA
GCGGGGATGGTAGGTGGTTTGGACCCGCCGGGCCGCCGTCGTTTCCAGAAAGGGTTTGACTGGAGGAACCTCT
GGAGCAGCTGTTGGCTGGCTCCTCTGGCTGATGGCATGTTGAGGTACATGGGCCAGCGGCAGCGAGGGCATCC
AATCCAGAGGGGTCCACTCTAGAGGCCAGGCCACCAGCACCATGGGCCAGTGTGTCACCAAGTGTAAGAATCC
CTCATCGACCCTGGGCAGCAAAAATGGAGACCGTGAGCCCAGCAACAAGTCACATAGCAGGAGGGGTGCAGGC
CACCGTGAGGAGCAGGTACCACCCTGTGGCAAGCCAGGTGGAGATATCCTCGTCAACGGGACCAAGAAGGCCG
AGGCTGCCACTGAGGCCTGCCAGCTGCCAACGTCCTCGGGAGATGCTGGGAGGGAGTCCAAGTCCAATGCCGA
GGAGTCTTCCTTGCAAAGATTGGAAGAACTGTTCAGGCGCTACAAGGATGAGCGGGAAGATGCAATTTTGGAG
GAAGGCATGGAGCGCTTTTGCAATGACCTGTGTGTTGACCCCACAGAATTTCGAGTGCTGCTCTTGGCTTGGA
AGTTCCAGGCTGCAACCATGTGCAAATTCACCAGGAAGGAGTTTTTTGATGGCTGCAAAGCAATAAGTGCAGA
CAGCATTGACGGAATCTGTGCACGGTTCCCTAGCCTCTTAACAGAAGCCAAACAAGAGGATAAATTCAAGGAT
CTCTACCGGTTTACATTTCAGTTTGGCCTGGACTCTGAAGAAGGGCAGCGGTCACTGCATCGGGAAATAGCCA
TTGCCCTGTGGAAACTAGTCTTTACCCAGAACAATCCTCCGGTATTGGACCAATGGCTAAACTTCCTAACAGA
GAACCCCTCGGGGATCAAGGGCATCTCCCGGGACACTTGGAACATGTTCCTTAACTTCACTCAGGTGATTGGC
CCTGACCTCAGCAACTACAGTGAAGATGAGGCCTGGCCAAGTCTCTTTGACACCTTTGTGGAGTGGGAAATGG
AGCGAAGGAAAAGAGAAGGGGAAGGGAGAGGTGCACTCAGCTCAGGGCCTGAGGGCTTGTGTCCCGAGGAGCA
GACTTAGTGGCTCTGTCCCAGGAGCAGCAGCAAGGATCTGCCAGCTGCCCTGCAGCCAACTGAGGAATTGGAC
CATTTTGGAAATTACTGAAGATCCGGATATTTTCTACTTTACACCTTTCTCTGCCTTGTATCTGAAAGGGCTC
TAAAATGCTGTATCATGTTTTAGGCACTTTCTTCATTTTTTTGGTTATTTTGGTTATTTCCTTTTTGGGGGGA
TCTCCCAGAATATTTGAACCTGGTTACATGTTGTGTATCTTTTTTTGAAGCCTTCAGATAGAATAAGCCTGCC
ATTTCTTGCACAAATTTAGGTTTTTTTTTTGTTTTTTTTTGTTTTTTTTTTTTTTTTTTTGGTAGGGGAGGGC
ATAGAGCAGGGCGGGGGGATGGGACTGTTAGGTTGAATTAACATTACAAAATGATACAGTGCCAGATCTCAGT
TTCGCATATTGTTTTTCAGGGCAGGTCTGTACTGTGTGTAGTGCTGTTTACATAGATGAATTTAGGTTGTAAT
AATTATTTTTAAAGATTTACACAGATTTGAATAGCAGTGTTAACTGTTAACCACATTGCATTAATTCCCAGGC
GATTTAGAGCTCTTGGAGAGCCAAGGCCAGCCAAGAGCATTTGTAGTCTGGTGACAACCCCCTTTTAAGCTAA
TTTATCCAGAACCCTGATTTCCCTCACTTCTTGCTCATTCCTTCTTTGACCTATTGCATTTCATGTTGAGTTT
TTCCATCAACATGCTGCACCTGTCAGTCAAGTGAGCATTTTTTAAGAACACATTGTACTGAGAACCACTTAAG
CATTGAATGCGGAGAAAGCAGTGCTACCTCAGTTTTGCTGGAAGTAGACTTCTTTGATAGTTTTCTTTCTTTG
ATGAAGTTTCTGTATTTTCATGTTGTAAGTGGAAATACTTTTTTTTGTTTGTTTGTTTCATTTGCCTTGGAGC
CAAAGTTTCTGTTCCTGGTGGTCGGGAAACTGCCTGCCGGCCAACTGACTTGAAGGAAAACTGTGGTATGGAG
CTCTGCTTGAATTTTTTTTTTTTTAATATTTTTATTTTTTTCTTTGAATATCATCAGCTTACTTGTCTGGCAA
GGGCAGAAGCCTGGGGTTGGCCTGAACTCTGCCAAACAAATATCAAAGTGTATTTAATAGTTAAATTTGTGCC
CTTTCCCTTCTTGCTGCACCCATGTTGTCACTTAACCCCCAGGAGTTATTTATTATCTTTTTGTTAAAGTCAG
GCTCATTTGGGGTAATGTGATGACTGTTTAGGTTTACATGACCCTCCTCTCCTTTCCCTACCCCCAAATATGT
ATATATACATATATAAAATATGTATATATTTTACCTATATAAAATATATATATATACACATATATGTATCTAT
ATTCCTTTGTTTCTTTGCCTGCTTATACTGGCCATAAAAGAGGGAGCTGCCTTCAATGTATAAAGTATAAGAA
GAGTGCCAGGGAATGCCATAATGGAGGCTTTTGGATCTGAATTTGGACCATTTCACTAAAGAGAACATGAGTT
TGCTCAGCCCTTTCCTCACAAGAGGGAGGGCCCCGGTTCCCCAGACTTCTCCACGCGCTGGCTCCATAAAGGC
CAGCTTTGGCCAGGCTGCCACAGGGGCCTGAGGAGCTCACTCTGGGCCTACCTGGTTTCAGTTAGAGGGTCCT
CCTGTTATTTTTCCATTTAAAAAGTATGTCCTCAGAAAACTGTACTGGAAGGATGGGTGGCAGGAACTTGTAT
AGTTCAGCTTCCAACACTTTGGAACAGATTAAAAAGGGAATCTTTTAAATAAAAACGTATAAAAATATTTATA
CTCTTGAGGTAATGAGACTTTGTCTGTTAAACATTTGGAGGTTTCTCCCTTAACCTAATACCCCGCTGCGTCC
CAGGTATGTTTCTCAGCCTGGGCAGGAATTGCATGTTTTGAGTTCCATTGTGAGCAGCCTTACAGCTCTGGGC
TCCCATCTTAAGGATTATTAAAGAGTTTTGGCAGTTGGTATTTTTCTAAAACTGATATTGACCATAGGGAACA
TACTTGGAATTTGTTTTTTTTTTTAAATCCTAAACCTGACAGTTCCTCCTTCAGAGGGGCAAATGGGAAACTT
TAAGATCACCCACGGTATAGTACTGCTAGAAAGCTGAAGGGGGTCTTGGGCCAGATGCCTGGCTTCTGTTCTA
GCTAAATAAGACTCTTGAATAAGTCTCCAGGGGTCCCAGCAGGTTCTGTGGGATCAGTTGTAGCTGGGTACCC
AGACTGAGGTTTTAAAAAGACTGCTTTTTCATTAAGCCAGTTTGCAACTCATTTTCCCCGGTTCTGGATTGGG
TAGTGGTTGACTGAGGGAAAAGCCAGGCTGCTCTTGGCCAGATAAGGCCCTTTCCATCCCAGATCAGAGTGTA
TCAGAGAAAGCTGCACAAAAGAGGCAGGCAGCCCAGGACCCTGAGTACTCTGGAGAAACTAGGTTCCTTCCCC
ACCCTTTAAGAAGACATTCCGTGCATTAGATGTACTAGAGTGGATGTATTTTGTTGTTTTTTAAATTAACTAT
TTAGCCTCCTCATCCCCCACCAAAAAAGCCATTTAGTTATTTTTTGGTTATATTGATCCATTTGCAAATGAGA
AGCCAGAAAAGGGAGCAGTCAGGGAGGGACTTACAAGTTCCTTTCAAGTTTGAGTACTTGATGCTCAGCAAAG
ATTTCAAGCTTCTGCAGTAGCTCTGGGCCAATGCTTGACTCTTTCATGACCACAAGAAATGCAGTTTTTCTGC
AAAGGGATCCAAGGTGAGGTGTGTGTAGGGTTTGAAGTTATACTTCTGGGAAGTGAAAAGTCTTGTTCCTTTC
AACCTAGAAATAGGTTTGCCACTTAATGAGTGAGCAGTAAGTCTGTGTAAGAGGCTGAATGCATGCCCCTCAG
ATAAGCCAGTACACTCCTTGCTTAGCAACAGAACATCAGGGTGATGTGGAGAGGGGCAGGATGTGGACGCCAC
TTTGGAAATCGGCAACATCTGAGGGCAACAACAAACAAGTGTGTTGGGAAATAAGAAATAACTCAGTTTTGAC
AACTGGCTTTGTCAGCTTTTGTGATGTTTCTTTAGCAGTTTATTGGAAAGATGGTATGAGATGACGTGCTGCT
TCATTGAATTGCTCTTTCCCCCATCTTTGCCAAATCTCAATGTATCGTTCTTAACCCCACCTCCTGTAAGGGG
CTTTGCTATGCTTCAGCTGGTTGTCTCAGCAGCTGAAGTGCTGCCCACCTGTGTGAGTTGGGTCCAGGAAACC
ATGTCTGCCCTTCTGATAAGGGAAGATGAATCTAGAGCTGGGTGAAGATCTAAATTTTAACCAAACCCCTGGG
CCCAGGAAAATAACAATTGAAAATGTACAAGGCAGTGTTTTCAATATTAAACTTCCCCAAGGAAAGCACAAAC
TAGTCTTTTTGGAAAGGGAGAAAGGATTAAGCCACACAGTATTAGTCTTTGAAGCAGTACTGGTCTCTAGGGG
CTGGTGCCAAAATGGAGTCCCATAGTAGTTACACTCGATGGCCTCATGTACTATATACTGTGCCAAATTGTAT
TAAACAGTGGTGGGGAGTTACTGGGATAAGAACTTGTCTAAAAGTTTACAAACCAAAACAGATCTGTTAGGTT
GGTGCAAAAGTAAGTTTTTGCCATACTTAATGTATTGCCATTAAGTATGGCAAAAACCACAATTACTTTTACA
CCAACCTATGTATTTAAGAATGTTTGGTTTGCCAGATTCCAAATGAGGTCTTCAGTGCAGCAAAGCCCAAAAG
GTGTAGACTCAGTTATGCAATTATAAGGTTAAGGCGTAGAAGAAAGCTGCTGCTAGGTTTTTGTTGCATTTTA
CTTGACTGCTCTGCTGTTTTTCTTGTCTCTCATGTTTGGTTAGCTATGACTTGAGCATCTTGGTAACTGACAA
AGGTCTTCCTTGGGGGACTTGAACATCTTGGTAAATGACAGGTCTTCTTGGAGGACTCCAGCAGTATCTTGTT
TAAACGACTGAAAGGACTATTAAGGTTGTTGAATTGTGTTAATTGGGACTCATTGAGGAAATGCGACATTGAT
CCTCCTCTTATTCCACAGTGTGTTTTCTGATCATATAAAGAAGGTTCCGAACCATCCATCCCCCTCAGAGTTT
ATTCCCCTGGTAAGCTGTAATTGCATATCCAGTTTAAACTGGACTGGGACTGCATGTTGGTGAGGATCGGCAG
GGGTTTTCCCCCTTTTCGAAAGATGAAATAGATTCTTGAGCACTGGTTGCAGAAGCCAAAATAGTTCAAATAG
CTTTGCATAACCATTGGGTTCTGCTTCTGATTCAGGTGCTGGGCATCATGTCCTCCCTATTCTTCTCTTCTTG
GAAACCCAGCCTATCTCATAAATACCTACTTCCGCCACCCATCCAACCTCCCTGCTCCTTTCAACACAAATCT
TGGATATTGCCAAAGGAAGCCATTCAGCAGCTGCTGGGGTTTTTCATCCCCCTGACATGCATACATTTGCTCT
GGGAGAAGTGTCTTCCCTCTGACCCTGGTCCCCAGCTCCGTCTGTGCTTAATTGCTCTTACCTGTTGCACTAA
TGAATATGACTAGGTTTTAAAGGGGGAATGTGAAGCAATAGGCACATGGGGCTTGGATGAATTGGTCCCACAG
ATATACCCTGCCTTAAGCCGCTGAGGTGATGAGTCCACTGCTCATGTGACCCTCCACCTTTGTGGATCCCTCT
TGGTTTGTGACCAGTGTGTCTGTTTGTTGAGGTTGTACAAACTTGACAAAAGTTAATACTTTTGTTTGTATTT
TCTGCACTGTTGCACTCTCCAAATGGCCCCTTGAGTATTTTTATTGACTTGTTACACACATTTTTGTCTTTGA
TGTCTACATTTTTTCCTTTAATGTTTTTTATTTGGAAGGTTACCTGCTGTTGGATTTAATAAATTTGTTTACT
TGAA
(SEQ ID NO: 153)
MGQCVTKCKNPSSTLGSKNGDREPSNKSHSRRGAGHREEQVPPCGKPGGDILVNGTKKAEAATEACQLPTSSG
DAGRESKSNAEESSLQRLEELFRRYKDEREDAILEEGMERFCNDLCVDPTEFRVLLLAWKFQAATMCKFTRKE
FFDGCKAISADSIDGICARFPSLLTEAKQEDKFKDLYRFTFQFGLDSEEGQRSLHREIAIALWKLVFTQNNPP
VLDQWLNFLTENPSGIKGISRDTWNMFLNFTQVIGPDLSNYSEDEAWPSLFDTFVEWEMERRKREGEGRGALS
SGPEGLCPEEQT*

[0137] An amino acid sequence for the protein encoded by the DDA1 gene that is a regulator of T cell exhaustion/dysfunction resistance is available from the UniPROT database at accession no. Q9BW61, cDNA NM_024050, with gene location at Chr 19: 17309518-17323298.

(SEQ ID NO: 154)
AAGTTACTGTGAGGCGGCGGCTAAGAAGGCGGCTCTGGTGGCGGCGGTGGAGGCTGAGGCGGCGGCCGAGGCG
GCGACGGAGGAAACAGAAGATGGCAGATTTTTTGAAAGGACTGCCTGTCTACAACAAAAGCAATTTTAGTCGA
TTTCACGCGGACTCCGTGTGCAAAGCCTCGAACCGACGGCCCTCAGTCTACCTGCCTACCCGCGAGTACCCGT
CTGAACAGATCATCGTGACAGAAAAGACAAACATCCTCCTGCGCTACCTGCATCAGCAATGGGACAAAAAGAA
CGCTGCCAAGAAGAGAGACCAGGAGCAAGTGGAGCTGGAAGGCGAGAGCTCCGCACCTCCCCGCAAGGTGGCG
CGGACCGACAGCCCAGACATGCACGAGGACACTTAAGACTCTCAACTCCACAGGCGCCTCCTGCCAGGTCTGC
TCCTCGGTCGCCCACCCGCCTGCCCGCCATGTGTAAGCACCCCGCCCGCCCGCCTCCCTGCCGGCCCATCCAC
ACCCTGCGTCCACACCACTTCCAACCTCATAGGAGCCGATGTATTTATTTTCCTTGAGTTTTTATTTATGCTG
TAACCTGTATCAAGCGTTGGTTAAAGGGGACATCAGACCCAGTAGTGTGATGTTGGTAGATGCTTTTTAAAAA
AAACAACATTGTCCCCCCGACCCCCGCCTTCCATCGGGCCAGTTCCCCGATTCCTGCCCCCAGTTCTCCAGAG
AACCAGAGTGTGTCTGTGAGAGTCTCTAGCGGGGGCTTTACTGTGGCCGGGCGACAGGGGCGGGCCCGGGGTG
GCCTGACCTACCAGGACAGCCGAGTGGCCTTCTCCCCCCCAACACCGGTCCAGGCCATTGAGACTCGGTCTTG
TCCCACGCTTCGCCCGGAACTTTCCCATGCCCAGGCCTCACTCAGCGTGCACGCACGTTGGGGAGAAGTCGGC
CCTTGGGATCTTTCTCTTGAGTCATTTTATTTTTATCATGGACTAGTGCGTGCTCCGTGTCCACCCCAATAAA
AGGGTCTTTCCTACTTGACCTCGCGTCTTTGCTCCACACACCTTGGCTGCAGAGGACGGAGCCCCTGGGAGTC
ATCCCTGTTGTCACCAAGAGGAGTGAGAAGGGCCCCCCACGCCAGGGGCCCCAGGACCGGCTGGATTCTCTCG
TGGGCTTGCTGAGGCCACCATGTTCAAGGCCAAGACCTGCCTGGACCATCCCCTCTGCCTCTCCTGTCAAGGT
GACCCCAAGGACAGGTCATTCCTGAGAGACGGTCCATGGTGCCAAGGATGGAGCGGGGTCAGCCCCCTGCCTG
GGATACCGCCAAGCAGGGCAGCGCACCTGTCAGACACCGCAGAGATGGCCGGCCTCATCCGGGGGCCTGGGGT
CTCTGGCCTCTGCTGCTCCCCTGAGGCATGGTGACAGTACAGACGGCATCTGGCCGGTCTTGCTGTCCTAGGT
GGTGGCCTCACCCTTGCTGGGTCATAGAGGAGCTGTACAGAAGGTTGGCACCTGGCAGTTGGCATGTGCCATG
GCCGCTCATGGGGACCCCTCTTCCGCCAGCTGGGCTGGGTTTGGGGCTGAGCTTGGGTATGTAGGGGTGTTCG
GGCTCTGGGCAGAAGGTTTGTGGCCCTGACCACTGAGCCTGGGGCTGGGGGAACACCGCTTCTCCCCTTATTG
CCCCCACTGGTGGTGGTGGGGATCTCAGTTTTCTTTTGTTTTGTTTTGTTTGTTTGTTTGAGTTGGGGTCTTG
TACTCTTTCCCAGGCTGGAGTGCAGTGGCGTAATCACAGCTCACTGCAGCCTCGACCTCAAGCCTTCCTCCCA
CCTCAGCCTTCCAAGCCGCTGGGACCACAGGCACCCACCACCATGCCTGGCTAATTTTTTTTTTTTTTTGAGA
TGGAGTCTCGCTGTGTCTCCCAGGCTGGAGTGCAGTGGCAAGATCTCAGCTCACTACAACCTCTGCCTCCCAG
GTTCAAGTGATTCTCCTACCTCAGCCTCCTGAGTAGCTGGGATTACACGCGTGCGCCCCTACACCCAGCTAAT
TTTTCTATTTTTAGTGGAGACGGCGTTTTGTCATGTTGGCCAGGCTGGTCTCGAACTCCTGACCTCAGGTGCT
TCGCCTGCCTCGGCCTCCCAAAGTGCTGTGACCGCACCTGGCTGCCTGGCTAATATTTTAAAAATTTTTTGTA
GAGACAGGGTTTCACCATGTTGCCCAGGCTGGTCTCAAACTCCTGGGCTCAAGTCATCCACCTTCCTCAGCCT
CCCAAAGTGCTGGGGTTACAGACGTGAACCACCGTGCCTGGCAGAGGTCTCTGTTTTGAGAGCTGAGTCTGAG
GGCGTTGGGATGGTGTAGGGTTGGGCCACAGAGCTAGCAGACACTCCGGGCTATGGAGGGTCCGCCTGCCCCA
GATTCCACTGTGGAGGGCCCTGCCTGTGTCAGACCCTCGGGCCTAGGCGGCCCATCTCTCCCAAGGACGGAGA
GTGCCAGGGTGGGCTCCCGTCCTACACAAGGAGTGGCTGACCAGGCCCAGGCACAGCACAGCCACCCTGCTGT
ACCTCCCAGCTCCCGGCAGTGTCTACACCACAGTGATGGTGCTACAGGGGCCATGTGGTCACAGGACAGGTGG
TCAGGAAATGCACACTTGACTGCGGTCGATGGTGCCGGGTCCGGCTGAATGCCCTGGAGGCTCCCAGGCCAGC
TGGGGAGTCCCAGTCCCCAGGGTTGGTGTGACCTGGGCAGGCCTGCGGTGTCCATCTGTGAATGACTGAGATG
GTGGGACTTCAGCTTCCAAGGCCAGGGGCCAGAGTGGGAGCAGGGGGCACTCCCGCCTTTCCCCTCGGCCTGT
CTAGACCTCTCTGGCTCCCAGTTTCTGCTTTGAGTGGCTGGGGGCTGTCTCCTGCCTGTGCTGTCTGCCCGTC
GCTCTGCAGGGCTGCTGGGCGGGCACCTCCTTCCCCTCCCCTACCTCAGCTCCCTCCTTTGGGGTCTGAGGGC
TGTGCCCCAGCTTGCCTCCCTGTGGCCTCCCCCTAGAACCCCTGGGTCTGTCGGGACATGCCCCACCTGGCAC
ACACACCCTGTGTAGCTCCCACTGCCTGTGGGAGGACGCTGGGCCCCTGAGCCGGCCTCTGTCTACCCCTCCT
GCCTTTGGGGTCCCCTTTACCCCACTGTTCCCCCAAACTGCCTTCCACCTTCTCCGCCTTTGCACAGGCTGTT
CTCCTGCCTCCAGTGAACTCTGACTTCTCCACAGCCTCCCAAAGGGCCCCTTGCTCACACTGGCCCAGCCCTG
CAGCATGGCCATGTTGGTCTCTGAGCCTTAAGCCTTTGGATGTGGACACATTTGTCCTCTTCCTGAAAAATGT
GAGGGTCTGAGAGGCCACGTTCCTGTTCCTGAGTCATACGACAGAGTCCCAGTGACTTGGGTCTGATGTCTGT
CCCACAGTGGGACATCCCTGCTGCATCCCAATGCCACCCCGTGTCCTGGGGACACCCAAATGTGCCATTCTCT
CAGTATCACAAGTCGGGGACTGCAGGAGGCTCAGGTGCCAGGTGCCTTCTGATGTTCATGCCACAAGCTCTTC
CCACTGTCTCTGGCTCCCCAGACGATGTTCCAGGAGGCGGGTGTGCCAGAAGGGGCCACGTCTTGCAAACCAC
CGCGCTGTCCTCTTTGAGAAGGAGTCTTACTCAGGACTGGGGCCTGTGCACACATTGTCGCCTCTTTTCAGCA
CTTAGAGATTCCTTCCTTTGTCTAGTGGCTGAAGCCAGGGCTGAAGTTGGCCTCCAAATCTGGGCCGTCTCAG
AGGCGGCGCAGCCTGGAGTTTTCCATCTGTGGCCAAGACCCAGTTTTTGGGAGGAGGCCCTCATGGGTCAAGC
CAGCCTGTACCAGGATGGGGGGAGGGGGTTCCCAACCTAGGCCCCAGCCACCCAGACTCCCCCACCCCCACTC
CCTTTTCCACTGCTCTGACCTCGGGCACTGTTGAAATATAGTTTTTATTGCATTTCTGCCGTTTTACAAAAAT
ATGACAAAATAAATTAAAAACAAATAAA
(SEQ ID NO: 155)
MADFLKGLPVYNKSNFSRFHADSVCKASNRRPSVYLPTREYPSEQIIVTEKTNILLRYLHQQWDKKNAAKKRD
QEQVELEGESSAPPRKVARTDSPDMHEDT*

[0138] An amino acid sequence for the protein encoded by the GABARAPL1 gene that is a regulator of T cell exhaustion/dysfunction resistance is available from the UniPROT database at accession no. Q9H0R8, cDNA NM_001363598, with gene location at Chr 12: 10212458-10223128.

(SEQ ID NO: 156)
GGCTCGCGGGGTGACGTCACAGCCCGACGCGCCACCCAGCTGTTTTTGTG
CTCCCAGCTCTAGCGAAAAGCCGCCGGTATTTCTCCATCTGGCTCTCCTC
TACCTCCAGGCAGGCTCACCCGAGATCCCCGCCCCGAACCCCCCCTGCAC
ACTCGGCCCAGCGCTGTTGCCCCCGGAGCGGACGTTTCTGCAGCTATTCT
GAGCACACCTTGACGTCGGCTGAGGGAGCGGGACAGGGTCAGCGGCGAAG
GAGGCAGGCCCCGCGCGGGGATCTCGGAAGCCCTGCGGTGCATCATGAAG
TTCCAGTACAAGGAGGACCATCCCTTTGAGTATCGGAAAAAGGAAGGAGA
AAAGATCCGGAAGAAATATCCGGACAGGGTCCCCGTGATTGTAGAGAAGG
CTCCAAAAGCCAGGGTGCCTGATCTGGACAAGAGGAAGTACCTAGTGCCC
TCTGACCTTACTGTTGGCCAGTTCTACTTCTTAATCCGGAAGAGAATCCA
CCTGAGACCTGAGGACGCCTTATTCTTCTTTGTCAACAACACCATCCCTC
CCACCAGTGCTACCATGGGCCAACTGTATGAGGTAATGGTTCTGGTTGCA
CAATACTGGATGCCGTCCAGTGCAGTCTGGCATCCTCTAGCCCTTGTTCT
AGATGCGTTGATAACACATCTGAGAAGTGGGGCAGAAGGTGTTATTTATC
CGGATCCTCTTACATATGGCAGTGTAAGGCTCTGAGAGATTAGATACCTC
TTGTTTTTTAGGGATTAGCCACTCTACTAGATTTAATCCTTCTGAAATCT
TGTCTGACTATAGTCTTGTCTGACTATAGTGTTTTAATGCTGGACTGTTT
ATTGA
(SEQ ID NO: 157)
MKFQYKEDHPFEYRKKEGEKIRKKYPDRVPVIVEKAPKARVPDLDKRKYL
VPSDLTVGQFYFLIRKRIHLRPEDALFFFVNNTIPPTSATMGQLYEVMVL
VAQYWMPSSAVWHPLALVLDALITHLRSGAEGVIYPDPLTYGSVRL*

[0139] An amino acid sequence for the protein encoded by the KDM5C gene that is a regulator of T cell exhaustion/dysfunction resistance is available from the UniPROT database at accession no. P41229, cDNA NM_001146702, with gene location at Chr X: 53176283-53225422.

```
  (SEQ ID NO: 158)
CTTGTTCCTCCGCCGTTGCAATGAACTATTTTCTCTCAGTCCGGGGTGGTACTTTTGAGTAACCCCTTCCAAA
TAGAAACCCATACCAGCCTATTTAGCTCGGTCTCCACTATATGAAGGTTTCCTAGGGCTTGGTGTGACGCAAC
GTATACGAGGCTCGGAAGGACACCCCGCGGAAGGATCCGGTTTGTTGTGGTGTGGGGAGGGGAGACGCTGACA
AACCAAGATGGCGGCGGCGGCGCTGAAGGCCGCGGCGTTTGGGAGGTAACTGTGGTGGCGAAGGCTGCGGTAG
TGGGGAGGCAACCACACAGTTTGGAAGAAACGGAGCGGGACGAAGAGGCGGTAGCAGTAGAGTCAGCCTGAGA
CTCTCAGAGCACGACGGCCACACGCCCCCTTAGGCCCTCGGCGGGCGGCGGCTGCCCCGCTTAGGGCCTAGCC
TCCGAGCATTGCCTCGGCTTCAAACAGCGGCGGCGCCATGAGTCCTTAAGGGCGGTCCAAGCCTCCCGATCCC
TGGCCCAGACCTCGGGCCCACCATGGAGCCGGGGTCCGACGATTTCCTACCGCCACCGGAGTGCCCGGTGTTC
GAGCCTAGCTGGGCCGAGTTCCGAGACCCTCTTGGCTACATCGCGAAAATCAGGCCCATCGCAGAGAAATCGG
GCATTTGCAAGATCCGCCCACCCGCGATTGTGGTGGAGGAAGGTGGTTATGAAGCTATCTGCAAGGACCGTCG
GTGGGCTCGGGTAGCCCAGCGCCTCAACTATCCACCAGGCAAAAATATTGGCTCCTTGCTACGCTCCCACTAC
GAACGCATTGTTTATCCCTATGAAATGTACCAGTCTGGAGCCAACCTTGTGCAGTGTAACACACGTCCATTTG
ATAATGAGGAGAAGGACAAGGAATACAAACCCCACAGCATCCCCCTACGACAGTCTGTGCAGCCTTCCAAGTT
CAACAGCTATGGCCGGCGGGCCAAGAGACTGCAGCCTGATCCGGAACCCACAGAGGAAGACATTGAGAAGAAT
CCAGAGCTGAAAAAGCTACAGATCTATGGGGCAGGCCCCAAGATGATGGGCCTGGGCCTCATGGCCAAAGACA
AGACTCTGCGGAAGAAAGATAAGGAGGGGCCTGAGTGTCCCCCCACAGTAGTGGTGAAGGAGGAGTTAGGTGG
GGATGTGAAGGTGGAGTCAACATCGCCTAAGACCTTCCTGGAGAGCAAGGAGGAGCTGAGTCACAGCCCAGAA
CCCTGCACCAAGATGACCATGAGGCTACGGAGGAACCACAGCAATGCCCAGTTTATTGAGTCATATGTCTGCC
GGATGTGTTCTCGAGGGGATGAGGATGACAAGCTCCTGCTGTGTGATGGCTGTGATGACAACTACCACATCTT
CTGCCTGCTGCCTCCTCTGCCTGAGATCCCCAAGGGTGTCTGGCGGTGCCCAAAGTGTGTCATGGCGGAGTGT
AAGCGGCCCCCAGAAGCCTTTGGCTTTGAGCAGGCTACCCGGGAATACACTCTGCAGAGCTTTGGCGAGATGG
CCGACTCCTTTAAAGCTGACTACTTCAACATGCCCGTGCATATGGTGCCCACAGAACTTGTGGAGAAGGAGTT
CTGGAGGCTGGTAAATAGCATTGAGGAAGATGTGACTGTTGAGTATGGAGCTGACATCCATTCCAAAGAATTT
GGCAGCGGTTTCCCTGTCAGTGACAGTAAACGGCACCTAACCCCCGAAGAGGAGGAGTATGCTACCAGTGGTT
GGAACCTAAATGTGATGCCGGTGTTGGAACAGTCTGTACTGTGCCACATCAATGCAGATATCTCTGGCATGAA
GGTGCCCTGGCTCTACGTGGGCATGGTCTTCTCAGCCTTTTGCTGGCATATTGAGGATCACTGGAGTTACTCC
ATTAACTACCTCCACTGGGGTGAGCCGAAGACCTGGTATGGGGTGCCCTCACTTGCAGCAGAACATTTGGAAG
AAGTGATGAAGAAGCTGACACCTGAACTATTTGATAGCCAGCCTGACCTCCTGCACCAACTTGTCACCCTCAT
GAATCCCAACACCCTCATGTCCCATGGTGTGCCAGTTGTCCGCACAAACCAGTGTGCAGGAGAGTTTGTCATC
ACCTTCCCCCGTGCTTACCACAGCGGCTTCAACCAAGGCTACAACTTTGCCGAGGCTGTCAACTTTTGCACTG
CTGACTGGTTGCCTGCTGGGCGCCAGTGCATTGAGCACTACCGCCGGCTCCGGAGATACTGCGTCTTCTCCCA
TGAGGAGCTTATCTGCAAGATGGCTGCCTGCCCAGAGAAGCTAGACCTGAACCTGGCGGCAGCTGTGCATAAG
GAGATGTTCATCATGGTGCAAGAAGAGCGGCGTCTACGAAAGGCCCTGCTGGAGAAGGGTATCACAGAGGCTG
AGCGAGAGGCTTTCGAGCTGCTCCCAGATGATGAGCGCCAGTGTATCAAGTGCAAGACTACGTGTTTCCTGTC
AGCCCTGGCCTGCTACGACTGCCCAGACGGCCTTGTCTGCCTTTCCCACATCAATGATCTCTGCAAGTGCTCC
AGTAGCCGGCAGTACCTGCGGTATCGGTATACCTTGGATGAGCTTCCTGCCATGCTGCATAAGCTGAAGGTTC
GGGCTGAGTCCTTTGACACCTGGGCCAACAAAGTGCGAGTGGCCCTGGAGGTGGAGGATGGGCGGAAGCGCAG
CCTTGAAGAACTGAGGGCACTAGAGTCTGAAGCCCGTGAGCGGAGGTTTCCTAATAGTGAGCTGCTGCAGCAA
CTAAAGAACTGCCTGAGTGAGGCAGAGGCTTGCGTGTCCCGAGCTCTGGGACTGGTCAGCGGCCAGGAAGCTG
GCCCCCACAGGGTGGCTGGTCTACAGATGACCCTGACTGAGCTCCGGGCCTTTCTGGACCAGATGAACAACCT
GCCTTGCGCCATGCACCAGATTGGGGATGTCAAGGGTGTTCTGGAACAGGTGGAGGCCTACCAGGCTGAGGCT
CGTGAGGCCCTGGCCTCACTGCCCTCCAGTCCAGGGCTACTGCAGTCCCTGTTGGAGAGGGGGGGGCAGCTGG
GGGTGGAGGTGCCTGAGGCCCAGCAGCTCCAGCGGCAGGTGGAACAGGCGCGATGGCTGGATGAGGTGAAACG
CACACTGGCCCCCTCAGCCCGAAGGGGCACCTTGGCTGTCATGCGAGGACTGTTGGTCGCGGGTGCCAGTGTA
GCCCCTAGCCCTGCTGTGGATAAAGCCCAGGCCGAGCTGCAGGAACTGCTGACCATTGCTGAACGCTGGGAGG
AGAAAGCCCACCTCTGCCTGGAGGCCAGGCAGAAGCATCCACCAGCCACACTTGAGGCCATAATCCGTGAAGC
GGAAAACATCCCTGTTCACCTGCCCAACATCCAGGCTCTCAAGGAGGCTCTTGCTAAGGCCCGGGCCTGGATT
GCTGATGTTGATGAGATCCAAAATGGTGACCACTACCCCTGCCTGGATGACTTGGAGGGCCTAGTAGCTGTGG
GCCGGGACCTACCTGTGGGGCTGGAGGAGCTGAGACAGCTAGAGCTACAGGTACTGACAGCGCACTCCTGGAG
GGAGAAGGCCTCCAAGACCTTCCTCAAGAAAAATTCTTGCTACACGCTGCTGGAGGTTCTCTGCCCATGTGCA
GATGCCGGCTCAGACAGCACCAAGCGCAGCCGGTGGATGGAGAAGGAGCTGGGGTTGTACAAATCTGACACAG
AGCTGCTGGGGCTGTCTGCGCAGGACCTCAGGGACCCAGGCTCTGTGATCGTGGCCTTCAAGGAGGGGGAACA
GAAGGAGAAGGAGGGTATCCTGCAGCTGCGTCGCACCAATTCGGCCAAGCCCAGTCCACTGGCATCATCGAGC
ACGGCCTCCTCTACAACCTCTATCTGTGTGTGTGGGCAGGTGCTGGCTGGGGGGGGAGCTCTGCAGTGTGACC
TGTGTCAGGACTGGTTCCATGGGCGGTGTGTGTCAGTGCCTCGCCTCCTCAGCTCTCCGAGGCCCAATCCCAC
CTCATCCCCACTGCTGGCCTGGTGGGAATGGGACACCAAATTCCTGTGTCCACTGTGTATGCGCTCAAGGCGC
CCGCGCCTGGAGACCATCCTGGCACTGCTGGTAGCCCTGCAGAGACTGCCTGTGCGGCTGCCCGAGGGCGAGG
CCCTGCAGTGCCTCACAGAGAGGGCCATCAGCTGGCAAGGCCGCGCCAGGCAGGCTCTGGCCTCTGAAGATGT
GACTGCTCTTTTGGGACGGCTGGCTGAGCTCCGCCAACGGCTACAGGCTGAACCTAGACCTGAGGAGCCTCCT
AACTACCCTGCAGCCCCTGCTTCTGACCCCCTCAGAGAGGGCAGTGGCAAGGATATGCCTAAGGTCCAGGGCT
TACTGGAGAATGGAGACAGTGTGACCAGTCCTGAGAAGGTAGCCCCGGAGGAGGGCTCAGATCTGGAGCTGCT
GTCCTCGCTGTTGCCACAGTTGACTGGCCCTGTGTTGGAACTGCCTGAGGCAACCCGGGCCCCCTTGGAGGAG
CTCATGATGGAGGGGGACCTGCTCGAGGTGACCCTGGATGAGAACCACAGCATCCCTGAGTCCCTTGACTTTT
GTATTCTGACTCCAAGGTATTGTTCAGACCTCAGCTCCTGGGGGCCGGCCCCTGGAGTCTTCCCTCCCTGGTA
GCCTCTAACCAGCATTCCCAGACACCTGAGGCAGATAGATGGATGGGCTGGTGGGCAGGGGGGTGGCTGGGGC
TGGGCCATCACCATTCCAGAGACAAGGCCAGTGTATATGCAAACTGGGGGACTCTCCTCCCTTCTCTCCCCAG
TTCTGGTCCTGGCCAGGCCATGCTACACTAACCCCTGCCCCCACTCTCCTCCCCTCTTTTCCTTCCTTCCTAC
CCCCTTCTCCCTCTCCCTTCCCCTGACTGTTCCACCCAGGAGGAGGAAACTTCACATAGCCGTGCTCACAGTT
TTTTATTTTAAAGGAATTTGGCTGGGGAGCTGAACAGGGCTCCCTGTGATCTGAAGAAAGCTTTTGGTGCTTG
TCCTCACAACCACCTCAGTCCTCCCTCCCTGTCCTCCCCTGTCTCCTTTCCTCCTCCTGGGTTCATGTTGTAA
TAAAAGAAGATTGTTGGTGTGTAATTAATTTGTTCAAAAGAAAAAAAAAAGCAAAACAAGAAACTTGGTTCCA
ACTGAAGCCTATTTTAATTTTATTTTATTATTTTCCTCTTGTTAGAAATAAAACCCTTAGAAACATTTTTTGG
AAACATGTTTCTGAAGTGCATTTCTCTTAGACGGGGAAGACAGTGCTTCCATCACCAGTCAGTGGAGCAGCTG
TAGTGCTGGCAGGAGCACTAGGGCTGAAGCCAGGGAGCTCTGGGTTCTGAAATCAAGTTCCACCAGCTTCTTA
ACCTTGGGCAAGACATTCTGATCCTCCCCCGACTCTAACCCCAAGCCACTTTCCCTCAAGTCCAAACAGATGG
GCTCGGGCCCCCTCACCCAAACTCCTACACTACAACCTCCCCCAGTTGATGCCCTCCAGTTTATCCTCCTCAA
GCTCCCAAAGGGATTTTTTTGTTAATGGCTTTATTGAGATATAATTTACATACTATAAAATTCACTTGTTTGA
AATGTACAATTCAGTGATTTGGGGGGTTTCTAAAGTGTAGATCTGATTATATACTGCTTAAAACCTTCCATGA
TGCTTTATTGCCCTTAAGATTATACATAGAATCTCGTTCTTCCTAGAATGTTTTCCTGTCTAACCCATCTACT
GCATAATTCCCTGATTTTTCTCCACAGGTTATGCCCCTGATGAATGGGGACTAAAGCTCAGATGTGTGGTCAT
TTGCAACCCCTGAGTTCACTTTTTTAAGACAGCTTATTGATATATATAATGTACATACCATACAGTCACCCAC
TTAAAAGTATACAATTAAATAGCTTTTAGTATATTCAGAGTTGTGCAGCCATCATTCGAAAAAAAATTTCAGA
ACATTTTCATCACTGCAGAAAGAAACTCCATATCCCTTAGGCGTCCTTTACCCCTCATCCCATTTGCCTATTC
TGGACATTTTACATAAATGGAATCGTATAATATGTGA
  (SEQ ID NO: 159)
MEPGSDDFLPPPECPVFEPSWAEFRDPLGYIAKIRPIAEKSGICKIRPPAIVVEEGGYEAICKDRRWARVAQR
LNYPPGKNIGSLLRSHYERIVYPYEMYQSGANLVQCNTRPFDNEEKDKEYKPHSIPLRQSVQPSKENSYGRRA
KRLQPDPEPTEEDIEKNPELKKLQIYGAGPKMMGLGLMAKDKTLRKKDKEGPECPPTVVVKEELGGDVKVEST
SPKTFLESKEELSHSPEPCTKMTMRLRRNHSNAQFIESYVCRMCSRGDEDDKLLLCDGCDDNYHIFCLLPPLP
EIPKGVWRCPKCVMAECKRPPEAFGFEQATREYTLQSFGEMADSFKADYFNMPVHMVPTELVEKEFWRLVNSI
EEDVTVEYGADIHSKEFGSGFPVSDSKRHLTPEEEEYATSGWNLNVMPVLEQSVLCHINADISGMKVPWLYVG
MVFSAFCWHIEDHWSYSINYLHWGEPKTWYGVPSLAAEHLEEVMKKLTPELFDSQPDLLHQLVTLMNPNTLMS
HGVPVVRTNQCAGEFVITFPRAYHSGENQGYNFAEAVNFCTADWLPAGRQCIEHYRRLRRYCVFSHEELICKM
AACPEKLDLNLAAAVHKEMFIMVQEERRLRKALLEKGITEAEREAFELLPDDERQCIKCKTTCFLSALACYDC
PDGLVCLSHINDLCKCSSSRQYLRYRYTLDELPAMLHKLKVRAESEDTWANKVRVALEVEDGRKRSLEELRAL
ESEARERRFPNSELLQQLKNCLSEAEACVSRALGLVSGQEAGPHRVAGLQMTLTELRAFLDQMNNLPCAMHQI
GDVKGVLEQVEAYQAEAREALASLPSSPGLLQSLLERGRQLGVEVPEAQQLQRQVEQARWLDEVKRTLAPSAR
RGTLAVMRGLLVAGASVAPSPAVDKAQAELQELLTIAERWEEKAHLCLEARQKHPPATLEAIIREAENIPVHL
PNIQALKEALAKARAWIADVDEIQNGDHYPCLDDLEGLVAVGRDLPVGLEELRQLELQVLTAHSWREKASKTF
LKKNSCYTLLEVLCPCADAGSDSTKRSRWMEKELGLYKSDTELLGLSAQDLRDPGSVIVAFKEGEQKEKEGIL
QLRRTNSAKPSPLASSSTASSTTSICVCGQVLAGAGALQCDLCQDWFHGRCVSVPRLLSSPRPNPTSSPLLAW
WEWDTKFLCPLCMRSRRPRLETILALLVALQRLPVRLPEGEALQCLTERAISWQGRARQALASEDVTALLGRL
AELRQRLQAEPRPEEPPNYPAAPASDPLREGSGKDMPKVQGLLENGDSVTSPEKVAPEEGSDLELLSSLLPQL
TGPVLELPEATRAPLEELMMEGDLLEVTLDENHSIPESLDFCILTPRYCSDLSSWGPAPGVFPPW*
```

[0140] An amino acid sequence for the protein encoded by the KRTAP10-9 gene that is a regulator of T cell exhaustion/dysfunction resistance is available from the UniPROT database at accession no. P60411, cDNA NM_198690, with gene location at Chr 21: 44627093-44628378.

(SEQ ID NO: 160)
ACACACTCACAAACTCACTCACTGACACACTCACACACTCACTTACACCTCCCCCAGCTCACCTCCTCCCCAC
CCCAGCATGGCCGCGTCCACCATGTCCATCCGCTCCAGCGCTTACTCCGACTCCTGGCAGGTGGACGACTGCC
CAGAGAGCTGCTGTGAGCCCCCCTGCTGCGCCACCAGCTGCTGCGCCCCGGCCCCCTGCCTGACCCTGGTCTG
CACCCCAGTGAGCCGTGTATCCAGCCCCTGCTGCCAGGTGACCTGTGAGCCCAGCCCCTGCCAATCAGGCTGC
ACCAGCTCCTGCACGCCCTCGTGCTGCCAGCAGTCTAGCTGCCAGCCGGCTTACTGCACCTCCTCCCCCTGCC
AGCAGGCCTGCTGCGTGCCCGTCTGCTGCAAGCCTGTGTGCTGCGTGCCCGTCTGCTGTGGGGCTTCTTCGTG
CTGCCAACAGTCTAGCTACCAGCCAGCTTGCTGTGCCTCTTCCTCCTGCCAGCCGGCCTGCTGTGTGCCCGTC
TGCTGCAAACCTGTGTGCTGTGCGCCCACCTGCTCTGAGGATTCCTATTCATGCTGCCAACAGTCTAGCTGCC
AGCCAGCTTGCTGCACTTCCTCCCCCTGCCAGCAGTCCTACTGTGTGCCTGTCTGCTGTAAGCCTGTCTGCTG
CAAACCCATCTGCTGTGTGCCTGTCTGCTCTGGGGCTTCCTCTTTGTGCTGCCAGCAGTCTGGCTGCCAGCCG
GCTTGCTGCACCACCTCCTGCTGCAGACCCTCCTCCTCTGTGTCCCTCCTCTGCCGCCCTGTGTGCAGGCCCG
CCTGCTGCGTGCCCGTCTCCTCCTGCTGTGCCCCCACCTCCTCCCGCCAGCCCAGCTATTGCCGCCAGGCCTC
CTGTGTGTCCCTTCTCTGCCGCCCTGTGTGCTCCCGCCCGGCCTGCTACAGCTTCTCCTCAGGCCAGAAGTCC
AGCTGCTGACGGTCATGTCCCCCAGGGCCAGCCGGGCTCAGGCCCCACCTCCCTGCCAGTCCTTGGACCTCCC
AGCCCACCCAGCCTCAGCACAGCTCAACACAGAAGGAGCAGCCCCAGCCACAGCCGCCCAGCCCCGGGGTCTC
AGATGCTCACTGGCTCCTCCCTGACCTCCCCCCCGGGCAGGCGAGCCCTGGCTTCTCCTCACGGTGCTTCCTG
GCTGCAGACCACAACCCTCCGCTGGTCGCTGGTTGGGGACGGGCCCTCCTGACCCGGGTCTCACCCCCAGCAG
CGTCACCCTCTGCCCCTGAGCACCAATAAAGCGTCTGCGGCCCCA
(SEQ ID NO: 161)
MAASTMSIRSSAYSDSWQVDDCPESCCEPPCCATSCCAPAPCLTLVCTPVSRVSSPCCQVTCEPSPCQSGCTS
SCTPSCCQQSSCQPAYCTSSPCQQACCVPVCCKPVCCVPVCCGASSCCQQSSYQPACCASSSCQPACCVPVCC
KPVCCAPTCSEDSYSCCQQSSCQPACCTSSPCQQSYCVPVCCKPVCCKPICCVPVCSGASSLCCQQSGCQPAC
CTTSCCRPSSSVSLLCRPVCRPACCVPVSSCCAPTSSRQPSYCRQASCVSLLCRPVCSRPACYSFSSGQKSSC*

[0141] An amino acid sequence for the protein encoded by the MADD gene that is a regulator of T cell exhaustion/dysfunction resistance is available from the UniPROT database at accession no. Q8WXG6, cDNA NM_001376574, with gene location at Chr 11: 47269161-47330031.

```
  (SEQ ID NO: 162)
AGTGCAGACGCGGAACTGGCGCCCGCTCGGAGCGGCGCCGCGCTGGGGAGCGACTGACGCCCCGCTGCCGGGG
GACGTCGGGCTGGGCCTGGCCAGTCCCCCAGAGCTTGGGAGACTTCGATTTTCAGAATTCCTCCTGGGAATGC
TGACTCCTTGCTTGGTGCCCTGATGCTTCTCTGAGATAAACTGATGAATTGGAACCATGGTGCAAAAGAAGAA
GTTCTGTCCTCGGTTACTTGACTATCTAGTGATCGTAGGGGCCAGGCACCCGAGCAGTGATAGCGTGGCCCAG
ACTCCTGAATTGCTACGGCGATACCCCTTGGAGGATCACACTGAGTTTCCCCTGCCCCCAGATGTAGTGTTCT
TCTGCCAGCCCGAGGGCTGCCTGAGCGTGCGGCAGCGGCGCATGAGCCTTCGGGATGATACCTCTTTTGTCTT
CACCCTCACTGACAAGGACACTGGAGTCACGCGATATGGCATCTGTGTTAACTTCTACCGCTCCTTCCAAAAG
CGAATCTCTAAGGAGAAGGGGGAAGGTGGGGCAGGGTCCCGTGGGAAGGAAGGAACCCATGCCACCTGTGCCT
CAGAAGAGGGTGGCACTGAGAGCTCAGAGAGTGGCTCATCCCTGCAGCCTCTCAGTGCTGACTCTACCCCTGA
TGTGAACCAGTCTCCTCGGGGCAAACGCCGGGCCAAGGCGGGGAGCCGCTCCCGCAACAGTACTCTCACGTCC
CTGTGCGTGCTCAGCCACTACCCTTTCTTCTCCACCTTCCGAGAGTGTTTGTATACTCTCAAGCGCCTGGTGG
ACTGCTGTAGTGAGCGCCTTCTGGGCAAGAAACTGGGCATCCCTCGAGGCGTACAAAGGGACACCATGTGGCG
GATCTTTACTGGATCGCTGCTGGTAGAGGAGAAGTCAAGTGCCCTTCTGCATGACCTTCGAGAGATTGAGGCC
TGGATCTATCGATTGCTGCGCTCCCCAGTACCCGTCTCTGGGCAGAAGCGAGTAGACATCGAGGTCCTACCCC
AAGAGCTCCAGCCAGCTCTGACCTTTGCTCTTCCAGACCCATCTCGATTCACCCTAGTGGATTTCCCACTGCA
CCTTCCCTTGGAACTTCTAGGTGTGGACGCCTGTCTCCAGGTGCTAACCTGCATTCTGTTAGAGCACAAGGTG
GTGCTACAGTCCCGAGACTACAATGCACTCTCCATGTCTGTGATGGCATTCGTGGCAATGATCTACCCACTGG
AGTATATGTTTCCTGTCATCCCGCTGCTACCCACCTGCATGGCATCAGCAGAGCAGCTGCTGTTGGCTCCAAC
CCCGTACATCATTGGGGTTCCTGCCAGCTTCTTCCTCTACAAACTGGACTTCAAAATGCCTGATGATGTATGG
CTAGTGGATCTGGACAGCAATAGGGTGATTGCCCCCACCAATGCAGAAGTGCTGCCTATCCTGCCAGAACCAG
AATCACTAGAGCTGAAAAAGCATTTAAAGCAGGCCTTGGCCAGCATGAGTCTCAACACCCAGCCCATCCTCAA
TCTGGAGAAATTTCATGAGGGCCAGGAGATCCCCCTTCTCTTGGGAAGGCCTTCTAATGACCTGCAGTCCACA
CCGTCCACTGAATTCAACCCACTCATCTATGGCAATGATGTGGATTCTGTGGATGTTGCAACCAGGGTTGCCA
TGGTACGGTTCTTCAATTCCGCCAACGTGCTGCAGGGATTTCAGATGCACACGCGTACCCTGCGCCTCTTTCC
TCGGCCTGTGGTAGCTTTTCAAGCTGGCTCCTTTCTAGCCTCACGTCCCCGGCAGACTCCTTTTGCCGAGAAA
TTGGCCAGGACTCAGGCTGTGGAGTACTTTGGGGAATGGATCCTTAACCCCACCAACTATGCCTTTCAGCGAA
TTCACAACAATATGTTTGATCCAGCCCTGATTGGTGACAAGCCAAAGTGGTATGCTCATCAGCTGCAGCCTAT
CCACTATCGCGTCTATGACAGCAATTCCCAGCTGGCTGAGGCCCTGAGTGTACCACCAGAGCGGGACTCTGAC
TCCGAACCTACTGATGATAGTGGCAGTGATAGTATGGATTATGACGATTCAAGCTCTTCTTACTCCTCCCTTG
GTGACTTTGTCAGTGAAATGATGAAATGTGACATTAATGGTGATACTCCCAATGTGGACCCTCTGACACATGC
AGCACTGGGGGATGCCAGCGAGGTGGAGATTGACGAGCTGCAGAATCAGAAGGAAGCAGAAGAGCCTGGCCCA
GACAGTGAGAACTCTCAGGAAAACCCCCCACTGCGCTCCAGCTCTAGCACCACAGCCAGCAGCAGCCCCAGCA
CTGTCATCCACGGAGCCAACTCTGAACCTGCTGACTCTACGGAGATGGATGATAAGGCAGCAGTAGGCGTCTC
CAAGCCCCTCCCTTCCGTGCCTCCCAGCATTGGCAAATCGAACGTGGACAGACGTCAGGCAGAAATTGGAGAG
GGGTCAGTGCGCCGGCGAATCTATGACAATCCATACTTCGAGCCCCAATATGGCTTTCCCCCTGAGGAAGATG
AGGATGAGCAGGGGGAAAGTTACACTCCCCGATTCAGCCAACATGTCAGTGGCAATCGGGCTCAAAAGCTGCT
GCGGCCCAACAGCTTGAGACTGGCAAGTGACTCAGATGCAGAGTCAGACTCTCGGGCAAGCTCTCCCAACTCC
ACCGTCTCCAACACCAGCACCGAGGGCTTCGGGGGCATCATGTCTTTTGCCAGCAGCCTCTATCGGAACCACA
GTACCAGCTTCAGTCTTTCAAACCTCACACTGCCCACCAAAGGTGCCCGAGAGAAGGCCACGCCCTTCCCCAG
TCTGAAAGTATTTGGGCTAAATACTCTAATGGAGATTGTTACTGAAGCCGGCCCCGGGAGTGGTGAAGGAAAC
AGGAGGGCGTTAGTGGATCAGAAGTCATCTGTCATTAAACACAGCCCAACAGTGAAAAGAGAACCTCCATCAC
CCCAGGGTCGATCCAGCAATTCTAGTGAGAACCAGCAGTTCCTGAAGGAGGTGGTGCACAGCGTGCTGGACGG
CCAGGGAGTTGGCTGGCTCAACATGAAAAAGGTGCGCCGGCTGCTGGAGAGCGAGCAGCTGCGAGTCTTTGTC
CTGAGCAAGCTGAACCGCATGGTGCAGTCAGAGGACGATGCCCGGCAGGACATCATCCCGGATGTGGAGATCA
GTCGGAAGGTGTACAAGGGAATGTTAGACCTCCTCAAGTGTACAGTCCTCAGCTTGGAGCAGTCCTATGCCCA
CGCGGGTCTGGGTGGCATGGCCAGCATCTTTGGGCTTTTGGAGATTGCCCAGACCCACTACTATAGTAAAGAA
CCAGACAAGCGGAAGAGAAGTCCAACAGAAAGTGTAAATACCCCAGTTGGCAAGGATCCTGGCCTAGCTGGGC
GGGGGGACCCAAAGGCTATGGCACAACTGAGAGTTCCACAACTGGGACCTCGGGCACCAAGTGCCACAGGAAA
GGGTCCTAAGGAACTGGACACCAGAAGTTTAAAGGAAGAAAATTTTATAGCATCTATTGAATTGTGGAACAAG
CACCAGGAAGTGAAAAAGCAAAAAGCTTTGGAAAAACAGAGGCCTGAAGTAATCAAACCTGTCTTTGACCTTG
GTGAGACAGAGGAGAAAAAGTCCCAGATCAGCGCAGACAGTGGTGTGAGCCTGACGTCTAGTTCCCAGAGGAC
TGATCAAGACTCTGTCATCGGCGTGAGTCCAGCTGTTATGATCCGCAGCTCAAGTCAGGATTCTGAAGTTAGC
ACCGTGGTGAGTAATAGCTCTGGAGAGACCCTTGGAGCTGACAGTGACTTGAGCAGCAATGCAGGTGATGGAC
CAGGTGGCGAGGGCAGTGTTCACCTGGCAAGCTCTCGGGGCACTTTGTCTGATAGTGAAATTGAGACCAACTC
TGCCACAAGCACCATCTTTGGTAAAGCCCACAGCTTGAAGCCAAGCATAAAGGAGAAGCTGGCAGGCAGCCCC
ATTCGTACTTCTGAAGATGTGAGCCAGCGAGTCTATCTCTATGAGGGACTCCTAGGAAGGGACAAAGGATCCA
TGTGGGACCAGTTAGAGGATGCAGCTATGGAGACCTTTTCTATAAGCAAAGAGCGTTCTACTTTATGGGACCA
AATGCAATTCTGGGAAGATGCCTTCTTAGATGCTGTGATGTTGGAGAGAGAAGGGATGGGTATGGACCAGGGT
CCCCAGGAAATGATCGACAGGTACCTGTCCCTTGGAGAACATGACCGGAAGCGCCTGGAAGATGATGAAGATC
GCTTGTTGGCCACACTTCTGCACAACCTCATCTCCTACATGCTGCTGATGAAGGTAAATAAGAATGACATCCG
CAAGAAGGTGAGGCGCCTAATGGGAAAGTCGCACATTGGGCTTGTGTACAGCCAGCAAATCAATGAGGTGCTT
GATCAGCTGGCGAACCTGAATGGACGCGATCTCTCTATCTGGTCCAGTGGCAGCCGGCACATGAAGAAGCAGA
CATTTGTGGTACATGCAGGGACAGATACAAACGGAGATATCTTTTTCATGGAGGTGTGCGATGACTGTGTGGT
GTTGCGTAGTAACATCGGAACAGTGTATGAGCGCTGGTGGTACGAGAAGCTCATCAACATGACCTACTGTCCC
AAGACGAAGGTGTTGTGCTTGTGGCGTAGAAATGGCTCTGAGACCCAGCTCAACAAGTTCTATACTAAAAAGT
GTCGGGAGCTGTACTACTGTGTGAAGGACAGCATGGAGCGCGCTGCCGCCCGACAGCAAAGCATCAAACCCGG
ACCTGAATTGGGTGGCGAGTTCCCTGTGCAGGACCTGAAGACTGGTGAGGGTGGCCTGCTGCAGGTGACCCTG
GAAGGGATCAACCTCAAATTCATGCACAATCAGGAGCGGAAGGTTTTCATAGAGCTGAATCACATTAAAAAGT
GCAATACAGTTCGAGGCGTCTTTGTCCTGGAGGAATTTGTTCCTGAAATTAAAGAAGTGGTGAGCCACAAGTA
CAAGACACCAATGGCCCACGAAATCTGCTACTCCGTATTATGTCTCTTCTCGTACGTGGCTGCAGTTCATAGC
AGTGAGGAAGATCTCAGAACCCCGCCCCGGCCTGTCTCTAGCTGATGGAGAGGGGCTACGCAGCTGCCCCAGC
CCAGGGCACGCCCCTGGCCCCTTGCTGTTCCCAAGTGCACGATGCTGCTGTGACTGAGGAGTGGATGATGCTC
GTGTGTCCTCTGCAAGCCCCCTGCTGTGGCTTGGTTGGTTACCGGTTATGTGTCCCTCTGAGTGTGTCTTGAG
CGTGTCCACCTTCTCCCTCTCCACTCCCAGAAGACCAAACTGCCTTCCCCTCAGGGCTCAAGAATGTGTACAG
TCTGTGGGGCCGGTGTGAACCCACTATTTTGTGTCCTTGAGACATTTGTGTTGTGGTTCCTTGTCCTTGTCCC
TGGCGTTATAACTGTCCACTGCAAGAGTCTGGCTCTCCCTTCTCTGTGACCCGGCATGACTGGGCGCCTGGAG
CAGTTTCACTCTGTGAGGAGTGAGGGAACCCTGGGGCTCACCCTCTCAGAGGAAGGGCACAGAGAGGAAGGGA
AGAATTGGGGGGCAGCCGGAGTGAGTGGCAGCCTCCCTGCTTCCTTCTGCATTCCCAAGCCGGCAGCTACTGC
CCAGGGCCCGCAGTGTTGGCTGCTGCCTGCCACAGCCTCTGTGACTGCAGTGGAGCGGCGAATTCCCTGTGGC
CTGCCATGCCTTCGGCATCAGAGGATGGAGTGGTCGAGGCTAGTGGAGTCCCAGGGACCGCTGGCTGCTCTGC
CTGAGCATCAGGGAGGGGGCAGGAAAGACCAAGCTGGGTTTGCACATCTGTCTGCAGGCTGTCTCTCCAGGCA
CGGGGTGTCAGGAGGGAGAGACAGCCTGGGTATGGGCAAGAAATGACTGTAAATATTTCAGCCCCACATTATT
TATAGAAAATGTACAGTTGTGTGAATGTGAAATAAATGTCCTCAACTCCC
  (SEQ ID NO: 163)
MVQKKKFCPRLLDYLVIVGARHPSSDSVAQTPELLRRYPLEDHTEFPLPPDVVFFCQPEGCLSVRQRRMSLRD
DTSFVFTLTDKDTGVTRYGICVNFYRSFQKRISKEKGEGGAGSRGKEGTHATCASEEGGTESSESGSSLQPLS
ADSTPDVNQSPRGKRRAKAGSRSRNSTLTSLCVLSHYPFFSTFRECLYTLKRLVDCCSERLLGKKLGIPRGVQ
RDTMWRIFTGSLLVEEKSSALLHDLREIEAWIYRLLRSPVPVSGQKRVDIEVLPQELQPALTFALPDPSRFTL
VDFPLHLPLELLGVDACLQVLTCILLEHKVVLQSRDYNALSMSVMAFVAMIYPLEYMFPVIPLLPTCMASAEQ
LLLAPTPYIIGVPASFFLYKLDFKMPDDVWLVDLDSNRVIAPTNAEVLPILPEPESLELKKHLKQALASMSLN
TQPILNLEKFHEGQEIPLLLGRPSNDLQSTPSTEFNPLIYGNDVDSVDVATRVAMVRFFNSANVLQGFQMHTR
TLRLFPRPVVAFQAGSFLASRPRQTPFAEKLARTQAVEYFGEWILNPTNYAFQRIHNNMFDPALIGDKPKWYA
HQLQPIHYRVYDSNSQLAEALSVPPERDSDSEPTDDSGSDSMDYDDSSSSYSSLGDFVSEMMKCDINGDTPNV
DPLTHAALGDASEVEIDELQNQKEAEEPGPDSENSQENPPLRSSSSTTASSSPSTVIHGANSEPADSTEMDDK
AAVGVSKPLPSVPPSIGKSNVDRRQAEIGEGSVRRRIYDNPYFEPQYGFPPEEDEDEQGESYTPRFSQHVSGN
RAQKLLRPNSLRLASDSDAESDSRASSPNSTVSNTSTEGFGGIMSFASSLYRNHSTSFSLSNLTLPTKGAREK
ATPFPSLKVFGLNTLMEIVTEAGPGSGEGNRRALVDQKSSVIKHSPTVKREPPSPQGRSSNSSENQQFLKEVV
HSVLDGQGVGWLNMKKVRRLLESEQLRVFVLSKLNRMVQSEDDARQDIIPDVEISRKVYKGMLDLLKCTVLSL
EQSYAHAGLGGMASIFGLLEIAQTHYYSKEPDKRKRSPTESVNTPVGKDPGLAGRGDPKAMAQLRVPQLGPRA
PSATGKGPKELDTRSLKEENFIASIELWNKHQEVKKQKALEKQRPEVIKPVFDLGETEEKKSQISADSGVSLT
SSSQRTDQDSVIGVSPAVMIRSSSQDSEVSTVVSNSSGETLGADSDLSSNAGDGPGGEGSVHLASSRGTLSDS
EIETNSATSTIFGKAHSLKPSIKEKLAGSPIRTSEDVSQRVYLYEGLLGRDKGSMWDQLEDAAMETFSISKER
STLWDQMQFWEDAFLDAVMLEREGMGMDQGPQEMIDRYLSLGEHDRKRLEDDEDRLLATLLHNLISYMLLMKV
NKNDIRKKVRRLMGKSHIGLVYSQQINEVLDQLANLNGRDLSIWSSGSRHMKKQTFVVHAGTDTNGDIFFMEV
CDDCVVLRSNIGTVYERWWYEKLINMTYCPKTKVLCLWRRNGSETQLNKFYTKKCRELYYCVKDSMERAAARQ
QSIKPGPELGGEFPVQDLKTGEGGLLQVTLEGINLKFMHNQVFIELNHIKKCNTVRGVFVLEEFVPEIKEVVS
HKYKTPMAHEICYSVLCLFSYVAAVHSSEEDLRTPPRPVSS*
```

[0142] An amino acid sequence for the protein encoded by the MAPKAP1 gene that is a regulator of T cell exhaustion/dysfunction resistance is available from the UniPROT database at accession no. Q9BPZ7, cDNA NM 001006617, with gene location at Chr 9: 125437393-125707234.

```
  (SEQ ID NO: 164)
GTCGTGTGCGGCTCGGGGTAATAGGGCTGCTGCTCGGCCGGCCGGCGGCGGCGAGCAGCAGGGGCATGAGGGC
TAACCCGGGAAGCGGCAGCTGAGCGGGCCGGGAGGAGCGCCGGTCCCCGTGGATCCCGAGAGTGCAGAGCTCG
GGGCAGGGGCCGGGAGGCGTGGGGGAGCCGGGCCCTCCCCTCAGGAACGTGTCCCGGGGCCGACCCGGCCCGT
AGTGTGGAAGCAGCTTCAGGTAGGTGAGCTCGTGAAACAATATGAAGAGGAGAAAATAGCCTTTTAAGGAAAT
TGGCCCACAGAAAGGATGGCCTTCTTGGACAATCCAACTATCATTCTAGCTCATATTCGACAGTCACATGTGA
CCAGTGATGACACGGGAATGTGTGAGATGGTTCTCATTGATCATGATGTTGACCTAGAGAAGATTCATCCTCC
TTCAATGCCTGGAGACAGTGGGTCAGAAATTCAGGGAAGCAATGGTGAGACTCAGGGCTATGTATATGCCCAG
TCAGTCGATATTACCTCAAGTTGGGACTTTGGTATTAGAAGACGCTCAAACACAGCTCAAAGATTAGAACGAC
TCCGAAAAGAGAGACAAAACCAGATCAAATGCAAAAATATTCAGTGGAAAGAAAGAAATTCTAAGCAATCAGC
CCAGGAGTTAAAGTCACTGTTTGAAAAAAAATCTCTCAAAGAGAAGCCTCCAATTTCTGGGAAGCAGTCGATA
TTATCTGTACGCCTAGAACAGTGCCCTCTGCAGCTGAATAACCCTTTTAACGAGTATTCCAAATTTGATGGCA
AGGGTCATGTAGGTACAACAGCAACCAAGAAGATCGATGTCTACCTCCCTCTGCACTCGAGCCAGGACAGACT
GCTGCCAATGACCGTGGTGACAATGGCCAGCGCCAGGGTGCAGGACCTGATCGGGCTCATCTGCTGGCAGTAT
ACAAGCGAAGGACGGGAGCCGAAGCTCAATGACAATGTCAGTGCCTACTGCCTGCATATTGCTGAGGATGATG
GGGAGGTGGACACCGATTTCCCCCCGCTGGATTCCAATGAGCCCATTCATAAGTTTGGCTTCAGTACTTTGGC
CCTGGTTGAAAAGTACTCATCTCCTGGTCTGACATCCAAAGAGTCACTCTTTGTTCGAATAAATGCTGCTCAT
GGATTCTCCCTTATTCAGGTGGACAACACAAAGGTTACCATGAAGGAAATCTTACTGAAGGCAGTGAAGCGAA
GAAAAGGATCCCAGAAAGTTTCAGGCCCTCAGTACCGCCTGGAGAAGCAGAGCGAGCCCAATGTCGCCGTTGA
CCTGGACAGCACTTTGGAGAGCCAGAGCGCATGGGAGTTCTGCCTGGTCCGCGAGAACAGTTCAAGGGCAGAC
GGGGTTTTTGAGGAGGATTCGCAAATTGACATAGCCACAGTACAGGATATGCTTAGCAGCCACCATTACAAGT
CATTCAAAGTCAGCATGATCCACAGACTGCGATTCACAACCGACGTACAGCTAGGTATCTCTGGAGACAAAGT
AGAGATAGACCCTGTTACGAATCAGAAAGCCAGCACTAAGTTTTGGATTAAGCAGAAACCCATCTCAATCGAT
TCCGACCTGCTCTGTGCCTGTGACCTTGCTGAAGAGAAAAGCCCCAGTCACGCAATATTTAAACTCACGTATC
TAAGCAATCACGACTATAAACACCTCTACTTTGAATCGGACGCTGCTACCGTCAATGAAATTGTGCTCAAGGT
TAACTACATCCTGGAATCGCGAGCTAGCACTGCCCGGGCTGACTACTTTGCTCAAAAACAAAGAAAACTGAAC
AGACGTACGAGCTTCAGCTTCCAGAAGGAGAAGAAATCCGGGCAGCAGTGACACTGGCCTCCAGCCTCAATCT
GTTCCGTAGCTCAGAGCCTGCCTGCCAGGGCCAAGTGCCCTAGAGTCCACCCGGTGTCCTGAAGTCCTCGGGG
GGAGGCCAGCCCCTGGCTCACTGGCACAGGGCAGGTGGGCTCTCGGGGAAGGTGTCGGGGGCCCCCTAGGAGG
GAGCGCTGGGGACATTGCCATGGGACGGAAGTCTGCTTGGCAGTGGCTTTGATAAGCGATGCTTGGGGGTCAG
ACCACCCCCTAGAGGAGCCACGTGCCGCCCAGCCACCTTCAATGCCTGCCACCCTGCCCGAGGATGTACAGAG
CCGTGCCCACACATTTCCTTGCAACTTGATCAAATTTCTTAAAGCAAACAACAAAAATGTACATTTCTGTTTT
TCCTTTTAATAAACAGGTGTACTCTTTATCATGGTTGGTATGATGGACCATTCTTTGGGGCGGAGGATTGATT
ATGTTACTCTCTTTAAAATCTGTTCCCATATTGAACAGGCAGATTGGAAAAGCTATGGTTCGATTTCTCAGAA
GAAATGTTTAGGTCTTAGTCAATAGTTTTAACTATGCCATTTGTTTAAATGAGTGCATTTGCTTCGAGGGTAG
TGTCTTACTAAAAGTTAGGAACAGAGACCTAGTGGTGTGTCCAAGGCCGTGTCACTTTCCCCTTCAGCACACC
CCAGCTTCTGACCTCAGAGCCCAGGAGCTGCGTGGACAGTGTGGGGTGCCAGGAGGAGGGGCGGTGGCTGGTC
CTCAGGCACGCTGCACTCCCAGCCAGACATGGTCTTTCCGTTTCTTAAGTAGCAAGTGTAGGTTTCAGCTGGC
AGTTCCACCTGCATGTTCTCTGCTTCGCTGCCTTGGAAGGGGCCACATTCCCCATTCCTCTTCTCCTTACAGC
GCCTGCCTCCTTTTTCAAGCAGGCGGAAAGCTGCTGTTTCTCACGTTTCAGGGAGAGGGGTGAGCGGAGGGAG
ACCTGTGTCCGTGCCGTCCGGCTCCCTGGGTGGGAACAGGCAAGGGATCAGATGCCCCTGACACCACGCCTCT
GGCCACACCAGATGCCTCTGCAGTCCTCGACAGCCTCTTCAGTGTCCCTCCTGCGGTGATGTCCTTACTGTCC
CCAGCCAGGGCCGGGGACCGGTGTTTCACTGAGGACCTGCATTAGAAACATTTTTTAAATTGTTGTACAGGAA
GAGATGTGTCTAAAACAGCATCTTAAAGCTGAGTGTATTTCTTTGCACAAGGGGTCATGCTGATGAATTCTTC
TTTCATTCTGATCTTTGTTCAGCCAACAGGAGCGTCCTTTTCTAATGTCTTCCATTCCTACCCCCCACCCAAA
AACAAAAGAAATATTTGTAGCTTGCTATCTGTATTTGAATTTTTAGCAATTTTATATTTAGATACTTTGAAAA
ATGTAAATGACTAATTTGGTCATTAAATCTTGTGACATATTCGATATTAAAATGATATTAAAATAAAAGTCAT
ATAAATACACA
  (SEQ ID NO: 165)
MAFLDNPTIILAHIRQSHVTSDDTGMCEMVLIDHDVDLEKIHPPSMPGDSGSEIQGSNGETQGYVYAQSVDIT
SSWDFGIRRRSNTAQRLERLRKERQNQIKCKNIQWKERNSKQSAQELKSLFEKKSLKEKPPISGKQSILSVRL
EQCPLQLNNPFNEYSKFDGKGHVGTTATKKIDVYLPLHSSQDRLLPMTVVTMASARVQDLIGLICWQYTSEGR
EPKLNDNVSAYCLHIAEDDGEVDTDFPPLDSNEPIHKFGFSTLALVEKYSSPGLTSKESLFVRINAAHGFSLI
QVDNTKVTMKEILLKAVKRRKGSQKVSGPQYRLEKQSEPNVAVDLDSTLESQSAWEFCLVRENSSRADGVFEE
DSQIDIATVQDMLSSHHYKSFKVSMIHRLRFTTDVQLGISGDKVEIDPVTNQKASTKFWIKQKPISIDSDLLC
ACDLAEEKSPSHAIFKLTYLSNHDYKHLYFESDAATVNEIVLKVNYILESRASTARADYFAQKQRKLNRRTSF
SFQKEKKSGQQ*
```

[0143] An amino acid sequence for the protein encoded by the MED23 gene that is a regulator of T cell exhaustion/dysfunction resistance is available from the UniPROT database at accession no. Q9ULK4, cDNA NM_001270521, with gene location at Chr 6: 131573966-131628242.

(SEQ ID NO: 166)
GAGGGAACGCTCCAGGTAAAGCGCTGGGGGAGGAAGCGACGCCGAGGAGCTACGGTTTCCTCCAGAGGTCTCC
GCCCCTCTGCCCCTATATTCCCAGAGCTCGAGTCTGATCCGGGCCTTGCCGGGCACCCTGGAAAGGCGGGGGT
GATAGTACAGATGGAGACGCAACTGCAGAGCATTTTCGAAGAGGTGGTGAAAACGGAAGTTATAGAAGAGGCT
TTTCCTGGCATGTTTATGGATACTCCTGAAGATGAGAAAACAAAACTAATTAGCTGTTTGGGGGCCTTCAGAC
AGTTTTGGGGTGGTCTTTCTCAGGAGTCTCATGAACAGTGTATCCAGTGGATTGTTAAGTTTATTCATGGTCA
GCATAGTCCTAAAAGAATTTCTTTTCTTTATGACTGCTTAGCAATGGCAGTTGAGACTGGTCTCCTTCCACCC
AGGCTGGTTTGTGAATCCCTGATAAACTCTGACACTCTTGAGTGGGAAAGAACACAGCTTTGGGCCTTAACAT
TTAAACTGGTTCGGAAAATAATTGGGGGAGTGGATTACAAGGGTGTTCGAGATCTCTTAAAAGTGATTTTGGA
GAAGATTTTGACAATTCCTAATACAGTGAGCTCTGCTGTTGTACAGCAGCTTCTGGCAGCAAGAGAGGTTATA
GCATATATCTTGGAAAGAAATGCCTGCTTATTACCAGCCTATTTTGCAGTCACTGAGATCAGGAAACTGTATC
CTGAAGGCAAACTTCCACACTGGTTACTTGGAAACCTAGTATCAGACTTTGTGGATACCTTCAGGCCCACAGC
AAGGATAAACTCCATTTGTGGTCGCTGTAGTCTTCTGCCAGTTGTAAATAATTCGGGTGCCATTTGTAATTCA
TGGAAACTGGATCCTGCTACTCTTCGTTTTCCTTTGAAAGGCCTTTTGCCATATGATAAGGATCTGTTTGAAC
CACAGACTGCTTTGTTGAGATATGTATTGGAGCAGCCTTATTCCAGGGATATGGTCTGCAATATGCTAGGTTT
AAATAAGCAGACCTTGAACATTGCTCAGCACAAGCAGCGCTGCCCTGTGCTGGAGGACCAGTTGGTGGATCTG
GTTGTTTATGCCATGGAGCGATCTGAGACCGAGGAGAAGTTTGACGATGGGGGAACAAGCCAACTCCTGTGGC
AGCATCTCTCAAGTCAGCTCATTTTCTTTGTGCTTTTCCAGTTTGCAAGTTTTCCACATATGGTGCTTTCTCT
TCATCAGAAGTTAGCAGGGCGAGGACTGATTAAAGGCAGAGATCATCTTATGTGGGTTCTCCTGCAATTCATT
TCTGGAAGTATTCAGAAAAATGCACTAGCTGATTTTCTCCCTGTGATGAAGCTCTTCGACTTGCTATACCCAG
AAAAAGAATATATCCCAGTTCCTGATATTAACAAACCCCAGTCAACCCATGCCTTTGCAATGACCTGTATTTG
GATTCATCTCAATAGAAAAGCTCAAAATGACAACTCCAAGCTACAGATTCCAATACCTCATTCCCTAAGACTT
CACCATGAGTTCCTGCAGCAGAGTCTAAGAAATAAAAGTTTACAGATGAATGACTATAAGATTGCTCTATTGT
GTAATGCATACTCTACAAATTCAGAATGTTTTACATTACCCATGGGAGCTCTGGTAGAAACTATTTATGGAAA
TGGAATTATGAGGATACCTCTCCCTGGAACAAACTGTATGGCTTCAGGATCTATTACCCCCTTACCTATGAAC
CTCCTGGATTCACTGACAGTTCATGCCAAAATGAGCCTTATTCACAGCATTGCAACCAGGGTGATAAAACTTG
CTCATGCAAAGTCCAGTGTGGCCTTGGCTCCAGCCCTAGTGGAAACTTACAGTCGTTTATTGGTCTATATGGA
AATAGAGTCTTTGGGCATCAAAGGATTTATCAGTCAGCTTTTGCCAACTGTTTTCAAATCACATGCATGGGGG
ATCTTACACACACTCCTTGAGATGTTTAGCTACCGGATGCATCATATTCAGCCTCATTACAGAGTTCAGCTCC
TGAGTCATCTTCATACTTTGGCTGCAGTTGCACAAACAAACCAGAACCAGCTCCATCTTTGTGTCGAGAGCAC
TGCTCTCAGGCTTATAACAGCATTAGGTAGCTCAGAGGTACAACCGCAGTTTACACGCTTCCTTAGTGATCCC
AAAACAGTGCTCTCAGCAGAATCTGAAGAACTGAACCGAGCCTTGATATTGACCTTGGCTAGAGCAACTCATG
TAACAGATTTTTTTACAGGCTCTGATTCAATTCAGGGAACTTGGTGTAAAGACATACTTCAGACCATCATGAG
TTTCACTCCTCATAATTGGGCTTCACACACCCTGAGCTGTTTTCCAGGCCCACTACAGGCATTCTTCAAACAA
AATAATGTGCCTCAGGAAAGCCGTTTTAATCTGAAAAAAAATGTGGAGGAGGAGTATAGGAAGTGGAAGTCAA
TGAGCAACGAAAACGACATTATTACCCACTTCTCTATGCAGGGCTCCCCTCCTCTCTTTCTTTGTCTTCTCTG
GAAAATGCTCTTGGAAACAGATCATATTAATCAGATTGGCTATAGAGTATTAGAGAGAATTGGAGCCAGGGCC
TTGGTAGCCCATGTGAGGACATTTGCAGATTTCCTGGTATATGAGTTTTCTACATCAGCAGGGGGTCAGCAAC
TCAATAAATGCATTGAAATTCTTAATGACATGGTATGGAAGTATAACATTGTTACACTGGACAGATTAATTCT
CTGCCTGGCCATGCGTAGTCACGAAGGAAATGAAGCCCAGGTTTGTTATTTCATAATTCAGTTGCTGTTACTC
AAACCAAACGATTTTAGAAATCGAGTAAGTGACTTTGTGAAGGAAAATTCCCCAGAGCACTGGTTACAGAATG
ACTGGCACACCAAGCACATGAATTATCACAAGAAATATCCAGAGAAGTTGTATTTTGAGGGCCTCGCGGAACA
GGTGGATCCTCCTGTACAGATCCAGTCTCCCTATCTGCCCATCTATTTTGGGAATGTGTGTCTTCGATTCCTT
CCAGTATTTGATATAGTAATCCACAGATTTTTAGAGTTGCTTCCGGTATCCAAATCACTGGAGACTCTACTGG
ATCATCTAGGAGGCTTATATAAATTTCATGATCGTCCAGTGACTTATCTGTATAACACTCTGCACTATTATGA
AATGCACCTGAGAGACCGCGCATTTCTCAAACGAAAACTCGTCCATGCGATCATTGGCTCTCTGAAGGATAAT
CGACCGCAGGGCTGGTGTCTAAGTGACACTTACCTGAAATGCGCTATGAATGCACGAGAGGAAAATCCTTGGG
TTCCAGATGACACCTACTATTGCAGATTGATTGGCAGACTAGTCGATACGATGGCTGGCAAATCTCCTGGTCC
CTTTCCAAACTGTGACTGGAGATTCAATGAGTTTCCCAACCCAGCTGCCCATGCTCTCCATGTTACTTGTGTG
GAGCTCATGGCCTTGGCAGTTTCAGGCAAAGAAGTTGGGAATGCCCTTCTAAATGTTGTCCTAAAAAGTCAGC
CTTTAGTGCCAAGAGAGAACATTACAGCATGGATGAATGCAATTGGTTTGATCATCACTGCCCTACCAGAGCC
ATATTGGATTGTTCTTCATGATCGAATTGTGAGTGTCATCAGCAGCCCCAGCTTGACGTCTGAAACAGAGTGG
GTTGGCTATCCATTCCGCCTCTTTGATTTCACTGCCTGTCATCAGTCCTACTCTGAGATGAGTTGTAGCTATA
CGTTAGCTCTTGCACATGCTGTGTGGCACCATTCTAGCATCGGACAACTTTCTCTCATTCCAAAGTTTCTTAC
TGAAGTACTTCTTCCTATAGTGAAGACCGAATTCCAGTTGCTTTATGTATACCATCTTGTTGGACCATTTTTA
CAAAGATTTCAGCAAGAGAGAACTCGTTGTATGATAGAGATTGGTGTGGCGTTTTATGACATGCTGCTGAATG
TTGACCAGTGTAGCACCCATTTAAATTACATGGATCCCATCTGTGACTTCCTCTATCACATGAAGTATATGTT
TACTGGTGACAGCGTGAAAGAGCAAGTAGAGAAGATTATCTGTAACTTAAAACCAGCTTTAAAACTTCGTCTT
CGATTCATCACACACATTAGCAAGATGGAGCCAGCTGCAGTGCCTCCACAAGCCATGAACAGTGGGTCTCCAG
CACCTCAGTCTAATCAGTAAAAAGTCAGAGTACACAGCAAGGGTTCCAAATTAAGAGGAAGCAAAACGCTGCC
CAGATCCTGAGAAACCTGGAGAAAATCAACCTTAGTAGTTTCAACTCATACATTGTCTTGTTTGATTTTGTTC
TTTGTTTTTTATCCTCTTTAAGCACAGATGCGTGTTGAAGTCTAAGGTGTTCTGTCATCACACTCTCTTTACT
AGAATAAGTGTGCCCAGGCAGAAAAAAAAGTGTATTCAATGTTGCTGGCATGTGTGGATTCACAGCTCGTGGC
TGTAAGGAAATCTGGGGGTTTCATAAATCCATTAAAATCCTTTTAGAGTTGCCAA
(SEQ ID NO: 167)
METQLQSIFEEVVKTEVIEEAFPGMFMDTPEDEKTKLISCLGAFRQFWGGLSQESHEQCIQWIVKFIHGQHSP
KRISFLYDCLAMAVETGLLPPRLVCESLINSDTLEWERTQLWALTFKLVRKIIGGVDYKGVRDLLKVILEKIL
TIPNTVSSAVVQQLLAAREVIAYILERNACLLPAYFAVTEIRKLYPEGKLPHWLLGNLVSDFVDTFRPTARIN
SICGRCSLLPVVNNSGAICNSWKLDPATLRFPLKGLLPYDKDLFEPQTALLRYVLEQPYSRDMVCNMLGLNKQ
TLNIAQHKQRCPVLEDQLVDLVVYAMERSETEEKFDDGGTSQLLWQHLSSQLIFFVLFQFASFPHMVLSLHQK
LAGRGLIKGRDHLMWVLLQFISGSIQKNALADFLPVMKLEDLLYPEKEYIPVPDINKPQSTHAFAMTCIWIHL
NRKAQNDNSKLQIPIPHSLRLHHEFLQQSLRNKSLQMNDYKIALLCNAYSTNSECFTLPMGALVETIYGNGIM
RIPLPGTNCMASGSITPLPMNLLDSLTVHAKMSLIHSIATRVIKLAHAKSSVALAPALVETYSRLLVYMEIES
LGIKGFISQLLPTVFKSHAWGILHTLLEMFSYRMHHIQPHYRVQLLSHLHTLAAVAQTNQNQLHLCVESTALR
LITALGSSEVQPQFTRFLSDPKTVLSAESEELNRALILTLARATHVTDFFTGSDSIQGTWCKDILQTIMSFTP
HNWASHTLSCFPGPLQAFFKQNNVPQESRFNLKKNVEEEYRKWKSMSNENDIITHFSMQGSPPLFLCLLWKML
LETDHINQIGYRVLERIGARALVAHVRTFADFLVYEFSTSAGGQQLNKCIEILNDMVWKYNIVTLDRLILCLA
MRSHEGNEAQVCYFIIQLLLLKPNDERNRVSDFVKENSPEHWLQNDWHTKHMNYHKKYPEKLYFEGLAEQVDP
PVQIQSPYLPIYFGNVCLRFLPVFDIVIHRELELLPVSKSLETLLDHLGGLYKFHDRPVTYLYNTLHYYEMHL
RDRAFLKRKLVHAIIGSLKDNRPQGWCLSDTYLKCAMNAREENPWVPDDTYYCRLIGRLVDTMAGKSPGPFPN
CDWRENEFPNPAAHALHVTCVELMALAVSGKEVGNALLNVVLKSQPLVPRENITAWMNAIGLIITALPEPYWI
VLHDRIVSVISSPSLTSETEWVGYPFRLFDFTACHQSYSEMSCSYTLALAHAVWHHSSIGQLSLIPKELTEVL
LPIVKTEFQLLYVYHLVGPFLQRFQQERTRCMIEIGVAFYDMLLNVDQCSTHLNYMDPICDFLYHMKYMFTGD
SVKEQVEKIICNLKPALKLRLRFITHISKMEPAAVPPQAMNSGSPAPQSNQ*

[0144] An amino acid sequence for the protein encoded by the MED24 gene that is a regulator of T cell exhaustion/dysfunction resistance is available from the UniPROT database at accession no. 075448, cDNA NM_001079518, with gene location at Chr 17: 40019097-40061215.

```
  (SEQ ID NO: 168)
AAGTGCCAAAATGGCGATGCCTACCACCTAGAACTGGATTGTGCGCTCCATTTCTTTCACCTCAAAGCTGGCC
GCCACCGCTGCCACCTGCTCAGAGTGAAATAATGAAGGTGGTCAACCTGAAGCAAGCCATTTTGCAAGCCTGG
AAGGAGCGCTGGAGTGACTACCAATGGGCAATCAACATGAAGAAATTCTTTCCTAAAGGAGCCACCTGGGATA
TTCTCAACCTGGCAGATGCGTTACTAGAGCAGGCCATGATTGGACCATCCCCCAATCCTCTCATCTTGTCCTA
CCTGAAGTATGCCATTAGTTCCCAGTTTGATGACTTTTCTCGGGACCTGTGTGTCCAGGCATTGCTGGACATC
ATGGACATGTTTTGTGACCGTCTGAGCTGTCACGGCAAAGCAGAGGAATGCATCGGACTGTGCCGAGCCCTTC
TTAGCGCCCTCCACTGGCTGCTGCGCTGCACGGCAGCCTCTGCAGAGCGGCTGCGGGAGGGGCTGGAGGCCGG
CACTCCAGCCGCTGGGGAGAAGCAGCTTGCCATGTGCCTTCAGCGCCTGGAGAAAACCCTCAGCAGCACCAAG
AACCGGGCCCTGCTGCACATCGCCAAACTAGAGGAGGCCTCTTCTTGGACTGCCATCGAGCATTCTCTCTTGA
AACTTGGAGAGATCCTGGCCAATCTCAGCAACCCGCAGCTCCGGAGTCAGGCCGAGCAGTGTGGCACCCTCAT
TAGGAGCATCCCCACGATGCTGTCTGTGCATGCGGAGCAGATGCACAAGACCGGCTTCCCCACTGTCCACGCC
GTGATCCTGCTCGAGGGCACCATGAACCTGACAGGCGAGACGCAGTCCCTGGTGGAGCAGCTGACGATGGTGA
AGCGCATGCAGCATATCCCCACCCCACTTTTTGTCCTGGAGATCTGGAAAGCTTGCTTCGTGGGGCTCATTGA
GTCTCCCGAGGGTACGGAGGAGCTCAAGTGGACAGCTTTCACTTTCCTCAAGATTCCACAGGTTTTGGTGAAG
TTGAAGAAGTACTCTCATGGAGACAAGGACTTCACTGAGGATGTCAACTGTGCTTTTGAGTTCCTGCTGAAGC
TCACCCCCTTGTTGGACAAAGCTGACCAGCGCTGCAACTGTGACTGTACAAACTTCCTGCTCCAAGAATGTGG
CAAGCAGGGGCTTCTGTCTGAGGCCAGCGTCAACAACCTTATGGCTAAGCGCAAAGCGGACCGAGAGCACGCA
CCCCAGCAGAAATCGGGAGAGAATGCCAACATCCAGCCCAACATCCAGCTGATCCTCCGGGCGGAGCCCACTG
TCACAAACATCCTCAAGACGATGGATGCAGACCACTCTAAGTCACCGGAGGGACTGCTGGGAGTCCTGGGCCA
CATGCTGTCCGGGAAGAGTCTGGACTTGCTGCTGGCTGCCGCCGCCGCCACTGGAAAGCTGAAATCCTTCGCC
CGGAAATTCATCAATTTGAATGAATTCACAACCTATGGCAGCGAAGAAAGCACCAAACCGGCCTCCGTCCGGG
CCCTGCTGTTTGACATCTCCTTCCTCATGCTGTGCCATGTGGCCCAGACCTATGGTTCAGAGGTGATTCTGTC
CGAGTCGCGCACAGGAGCTGAGGTGCCCTTCTTCGAGACCTGGATGCAGACCTGCATGCCTGAGGAGGGCAAG
ATCCTGAACCCTGACCACCCCTGCTTCCGCCCCGACTCCACCAAAGTGGAGTCCCTGGTGGCCCTGCTCAACA
ACTCCTCGGAGATGAAGCTAGTGCAGATGAAGTGGCATGAGGCCTGTCTCAGCATCTCAGCCGCCATCTTGGA
AATCCTCAATGCCTGGGAGAATGGGGTCCTGGCCTTCGAGTCCATCCAGAAAATCACTGATAACATCAAAGGG
AAGGTATGCAGTCTGGCGGTGTGTGCTGTGGCTTGGCTTGTGGCCCACGTCCGGATGCTGGGGCTGGATGAGC
GTGAGAAGTCGCTGCAGATGATCCGCCAGCTGGCAGGGCCACTGTTTAGTGAGAACACCCTGCAGTTCTACAA
TGAGAGGGTGGTGATCATGAACTCGATCCTGGAGCGCATGTGTGCCGACGTGCTGCAGCAGACAGCCACGCAG
ATCAAGTTTCCCTCCACCGGGGTGGACACAATGCCCTACTGGAACCTGCTGCCCCCCAAGCGGCCCATCAAAG
AGGTGCTGACGGACATTTTTGCCAAGGTGCTGGAGAAGGGCTGGGTGGACAGCCGCTCCATCCACATCTTTGA
CACCCTGCTGCACATGGGCGGCGTCTACTGGTTCTGCAACAACCTGATTAAGGAGCTGCTGAAGGAGACGCGG
AAGGAGCACACGCTGCGGGCAGTGGAGCTGCTCTACTCCATCTTCTGCCTGGACATGCAGCAAGTGACCCTGG
TCCTGCTGGGCCACATCCTACCTGGCCTGCTCACTGACTCCTCCAAGTGGCACAGCCTCATGGACCCCCCGGG
CACTGCTCTTGCCAAGCTGGCCGTGTGGTGTGCCCTCAGTTCCTACTCCTCCCACAAGGGACAGGCGTCCACC
CGCCAGAAGAAGAGACACCGCGAAGACATTGAGGATTATATCAGCCTCTTCCCCCTGGACGATGTGCAGCCTT
CGAAGTTGATGCGACTGCTGAGCTCTAATGAGGACGATGCCAACATCCTTTCGAGCCCCACAGACCGATCCAT
GAGCAGCTCCCTCTCAGCCTCTCAGCTCCACACGGTCAACATGCGGGACCCTCTGAACCGAGTCCTGGCCAAC
CTGTTCCTGCTCATCTCCTCCATCCTGGGGTCTCGCACCGCTGGCCCCCACACCCAGTTCGTGCAGTGGTTCA
TGGAGGAGTGTGTGGACTGCCTGGAGCAGGGTGGCCGTGGCAGCGTCCTGCAGTTCATGCCCTTCACCACCGT
GTCGGAACTGGTGAAGGTGTCAGCCATGTCCAGCCCCAAGGTGGTTCTGGCCATCACGGACCTCAGCCTGCCC
CTGGGCCGCCAGGTGGCTGCTAAAGCCATTGCTGCACTCTGAGGGGCTTGGCATGGCCGCAGTGGGGGCTGGG
GACTGGCGCAGCCCCAGGCGCCTCCAAGGGAAGCAGTGAGGAAAGATGAGGCATCGTGCCTCACATCCGCTCC
ACATGGTGCAAGAGCCTCTAGCGGCTTCCAGTTCCCCGCTCCTGACTCCTGACCTCCAGGATGTCTCCCGGTT
TCTTCTTTCAAAATTTCCTCTCCATCTGCTGGCACCTGAGGAGAGTGAGCAGCCTGGACCACAAGCCCAGTGG
TCACCCCTGTGTGCGCCCGCCCCAGCCCAGGAGTAGTCTTACCTCTGAGGAACTTTCTAGATGCAAAGTGTGT
ATGTGTGTGTGTGTGTGTGTGTGTGTGTGTTTGTGTGTATTTTGTAATATGTGAGGGAAATCTACCTTCGTTC
ATGTATAAATAAAGCTCCTCGTGGC
  (SEQ ID NO: 169)
MKVVNLKQAILQAWKERWSDYQWAINMKKFFPKGATWDILNLADALLEQAMIGPSPNPLILSYLKYAISSQFD
DFSRDLCVQALLDIMDMFCDRLSCHGKAEECIGLCRALLSALHWLLRCTAASAERLREGLEAGTPAAGEKOLA
MCLQRLEKTLSSTKNRALLHIAKLEEASSWTAIEHSLLKLGEILANLSNPQLRSQAEQCGTLIRSIPTMLSVH
AEQMHKTGFPTVHAVILLEGTMNLTGETQSLVEQLTMVKRMQHIPTPLFVLEIWKACFVGLIESPEGTEELKW
TAFTFLKIPQVLVKLKKYSHGDKDFTEDVNCAFEFLLKLTPLLDKADQRCNCDCTNELLQECGKQGLLSEASV
NNLMAKRKADREHAPQQKSGENANIQPNIQLILRAEPTVTNILKTMDADHSKSPEGLLGVLGHMLSGKSLDLL
LAAAAATGKLKSFARKFINLNEFTTYGSEESTKPASVRALLFDISFLMLCHVAQTYGSEVILSESRTGAEVPF
FETWMQTCMPEEGKILNPDHPCFRPDSTKVESLVALLNNSSEMKLVQMKWHEACLSISAAILEILNAWENGVL
AFESIQKITDNIKGKVCSLAVCAVAWLVAHVRMLGLDEREKSLQMIRQLAGPLFSENTLQFYNERVVIMNSIL
ERMCADVLQQTATQIKFPSTGVDTMPYWNLLPPKRPIKEVLTDIFAKVLEKGWVDSRSIHIFDTLLHMGGVYW
FCNNLIKELLKETRKEHTLRAVELLYSIFCLDMQQVTLVLLGHILPGLLTDSSKWHSLMDPPGTALAKLAVWC
ALSSYSSHKGQASTRQKKRHREDIEDYISLFPLDDVQPSKLMRLLSSNEDDANILSSPTDRSMSSSLSASQLH
TVNMRDPLNRVLANLFLLISSILGSRTAGPHTQFVQWEMEECVDCLEQGGRGSVLQFMPFTTVSELVKVSAMS
SPKVVLAITDLSLPLGRQVAAKAIAAL*
```

[0145] An amino acid sequence for the protein encoded by the MYB gene that is a regulator of T cell exhaustion/dysfunction resistance is available from the UniPROT database at accession no. P10242, cDNA NM_001130172, with gene location at Chr 6: 135181308-135219173.

```
  (SEQ ID NO: 170)
ACACTTTAATATCAACCTGTTTCCTCCTCCTCCTTCTCCTCCTCCTCCGTGACCTCCTCCTCCTCTTTCTCCT
GAGAAACTTCGCCCCAGCGGTGCGGAGCGCCGCTGCGCAGCCGGGGAGGGACGCAGGCAGGCGGCGGGCAGCG
GGAGGCGGCAGCCCGGTGCGGTCCCCGCGGCTCTCGGCGGAGCCCCGCGCCCGCCGCGCCATGGCCCGAAGAC
CCCGGCACAGCATATATAGCAGTGACGAGGATGATGAGGACTTTGAGATGTGTGACCATGACTATGATGGGCT
GCTTCCCAAGTCTGGAAAGCGTCACTTGGGGAAAACAAGGTGGACCCGGGAAGAGGATGAAAAACTGAAGAAG
CTGGTGGAACAGAATGGAACAGATGACTGGAAAGTTATTGCCAATTATCTCCCGAATCGAACAGATGTGCAGT
GCCAGCACCGATGGCAGAAAGTACTAAACCCTGAGCTCATCAAGGGTCCTTGGACCAAAGAAGAAGATCAGAG
AGTGATAGAGCTTGTACAGAAATACGGTCCGAAACGTTGGTCTGTTATTGCCAAGCACTTAAAGGGGAGAATT
GGAAAACAATGTAGGGAGAGGTGGCATAACCACTTGAATCCAGAAGTTAAGAAAACCTCCTGGACAGAAGAGG
AAGACAGAATTATTTACCAGGCACACAAGAGACTGGGGAACAGATGGGCAGAAATCGCAAAGCTACTGCCTGG
ACGAACTGATAATGCTATCAAGAACCACTGGAATTCTACAATGCGTCGGAAGGTCGAACAGGAAGGTTATCTG
CAGGAGTCTTCAAAAGCCAGCCAGCCAGCAGTGGCCACAAGCTTCCAGAAGAACAGTCATTTGATGGGTTTTG
CTCAGGCTCCGCCTACAGCTCAACTCCCTGCCACTGGCCAGCCCACTGTTAACAACGACTATTCCTATTACCA
CATTTCTGAAGCACAAAATGTCTCCAGTCATGTTCCATACCCTGTAGCGTTACATGTAAATATAGTCAATGTC
CCTCAGCCAGCTGCCGCAGCCATTCAGAGACACTATAATGATGAAGACCCTGAGAAGGAAAAGCGAATAAAGG
AATTAGAATTGCTCCTAATGTCAACCGAGAATGAGCTAAAAGGACAGCAGACACAGAACCACACATGCAGCTA
CCCCGGGTGGCACAGCACCACCATTGCCGACCACACCAGACCTCATGGAGACAGTGCACCTGTTTCCTGTTTG
GGAGAACACCACTCCACTCCATCTCTGCCAGCGGATCCTGGCTCCCTACCTGAAGAAAGCGCCTCGCCAGCAA
GGTGCATGATCGTCCACCAGGGCACCATTCTGGATAATGTTAAGAACCTCTTAGAATTTGCAGAAACACTCCA
ATTTATAGATTCTTTCTTAAACACTTCCAGTAACCATGAAAACTCAGACTTGGAAATGCCTTCTTTAACTTCC
ACCCCCCTCATTGGTCACAAATTGACTGTTACAACACCATTTCATAGAGACCAGACTGTGAAAACTCAAAAGG
AAAATACTGTTTTTAGAACCCCAGCTATCAAAAGGTCAATCTTAGAAAGCTCTCCAAGAACTCCTACACCATT
CAAACATGCACTTGCAGCTCAAGAAATTAAATACGGTCCCCTGAAGATGCTACCTCAGACACCCTCTCATCTA
GTAGAAGATCTGCAGGATGTGATCAAACAGGAATCTGATGAATCTGGAATTGTTGCTGAGTTTCAAGAAAATG
GACCACCCTTACTGAAGAAAATCAAACAAGAGGTGGAATCTCCAACTGATAAATCAGGAAACTTCTTCTGCTC
ACACCACTGGGAAGGGGACAGTCTGAATACCCAACTGTTCACGCAGACCTCGCCTGTGGCAGATGCACCGAAT
ATTCTTACAAGCTCCGTTTTAATGGCACCAGCATCAGAAGATGAAGACAATGTTCTCAAAGCATTTACAGTAC
CTAAAAACAGGTCCCTGGCGAGCCCCTTGCAGCCTTGTAGCAGTACCTGGGAACCTGCATCCTGTGGAAAGAT
GGAGGAGCAGATGACATCTTCCAGTCAAGCTCGTAAATACGTGAATGCATTCTCAGCCCGGACGCTGGTCATG
TGAGACATTTCCAGAAAAGCATTATGGTTTTCAGAACACTTCAAGTTGACTTGGGATATATCATTCCTCAACA
TGAAACTTTTCATGAATGGGAGAAGAACCTATTTTTGTTGTGGTACAACAGTTGAGAGCAGCACCAAGTGCAT
TTAGTTGAATGAAGTCTTCTTGGATTTCACCCAACTAAAAGGATTTTTAAAAATAAATAACAGTCTTACCTAA
ATTATTAGGTAATGAATTGTAGCCAGTTGTTAATATCTTAATGCAGATTTTTTTAAAAAAAACATAAAATGAT
TTATCTGTATTTTAAAGGATCCAACAGATCAGTATTTTTTCCTGTGATGGGTTTTTTGAAATTTGACACATTA
AAAGGTACTCCAGTATTTCACTTTTCTCGATCACTAAACATATGCATATATTTTTAAAAATCAGTAAAAGCAT
TACTCTAAGTGTAGACTTAATACCATGTGACATTTAATCCAGATTGTAAATGCTCATTTATGGTTAATGACAT
TGAAGGTACATTTATTGTACCAAACCATTTTATGAGTTTTCTGTTAGCTTGCTTTAAAAATTATTACTGTAAG
AAATAGTTTTATAAAAAATTATATTTTTATTCAGTAATTTAATTTTGTAAATGCCAAATGAAAAACGTTTTTT
GCTGCTATGGTCTTAGCCTGTAGACATGCTGCTAGTATCAGAGGGGCAGTAGAGCTTGGACAGAAAGAAAAGA
AACTTGGTGTTAGGTAATTGACTATGCACTAGTATTTCAGACTTTTTAATTTTATATATATATACATTTTTTT
TCCTTCTGCAATACATTTGAAAACTTGTTTGGGAGACTCTGCATTTTTTATTGTGGTTTTTTTGTTATTGTTG
GTTTATACAAGCATGCGTTGCACTTCTTTTTTGGGAGATGTGTGTTGTTGATGTTCTATGTTTTGTTTTGAGT
GTAGCCTGACTGTTTTATAATTTGGGAGTTCTGCATTTGATCCGCATCCCCTGTGGTTTCTAAGTGTATGGTC
TCAGAACTGTTGCATGGATCCTGTGTTTGCAACTGGGGAGACAGAAACTGTGGTTGATAGCCAGTCACTGCCT
TAAGAACATTTGATGCAAGATGGCCAGCACTGAACTTTTGAGATATGACGGTGTACTTACTGCCTTGTAGCAA
AATAAAGATGTGCCCTTATTTTACCTA
  (SEQ ID NO: 171)
MARRPRHSIYSSDEDDEDFEMCDHDYDGLLPKSGKRHLGKTRWTREEDEKLKKLVEQNGTDDWKVIANYLPNR
TDVQCQHRWQKVLNPELIKGPWTKEEDQRVIELVQKYGPKRWSVIAKHLKGRIGKQCRERWHNHLNPEVKKTS
WTEEEDRIIYQAHKRLGNRWAEIAKLLPGRTDNAIKNHWNSTMRRKVEQEGYLQESSKASQPAVATSFQKNSH
LMGFAQAPPTAQLPATGQPTVNNDYSYYHISEAQNVSSHVPYPVALHVNIVNVPQPAAAAIQRHYNDEDPEKE
KRIKELELLLMSTENELKGQQTQNHTCSYPGWHSTTIADHTRPHGDSAPVSCLGEHHSTPSLPADPGSLPEES
ASPARCMIVHQGTILDNVKNLLEFAETLQFIDSFLNTSSNHENSDLEMPSLTSTPLIGHKLTVTTPFHRDQTV
KTQKENTVERTPAIKRSILESSPRTPTPFKHALAAQEIKYGPLKMLPQTPSHLVEDLQDVIKQESDESGIVAE
FQENGPPLLKKIKQEVESPTDKSGNFFCSHHWEGDSLNTQLFTQTSPVADAPNILTSSVLMAPASEDEDNVLK
AFTVPKNRSLASPLQPCSSTWEPASCGKMEEQMTSSSQARKYVNAFSARTLVM*
```

[0146] An amino acid sequence for the protein encoded by the YO5A gene that is a regulator of T cell exhaustion/dysfunction resistance is available from the UniPROT database at accession no. Q9Y4I1, cDNA NM_001142495, with gene location at Chr 15: 52307281-52529132.

(SEQ ID NO: 172)
GGCGGCGGCGGTGGCGGCGGCGGCAGCGGAGGCAGCATCGCGGGCCGCCGAAGTGGCTGCGGCGGCGGCGGCG
ACCCCTAGGACCCCGGGCAGGTGGAGCGCTCGCGGCTGCTCGCGGCGAGCCCGGGAGTGATGGCGAGGCCCCT
GCGGGCGGCCAGCGCCTGAGGCGCCCCGCCCCGCCCCGCCCCGCGCGGCCCTCCCCGCCCGGCCCTGCCCTGC
CCTGCTCCCTGCCGGCGGCTGCGGGCGCTTCCTAGTCCGCTCGGGCGGCCGCCCAGGCGAGGTGCGGCCTCCG
CACAGGCGGGGGGCGTAGGCGCGCGGGGCCCGCCATGGCTGCGTCGGAGCTCTACACAAAGTTTGCCAGGGTT
TGGATACCTGATCCAGAGGAAGTCTGGAAGTCAGCAGAGCTGCTCAAAGATTATAAGCCAGGAGATAAAGTCC
TCCTGCTTCACCTCGAGGAAGGAAAGGATTTGGAATACCATCTAGATCCAAAGACCAAGGAGCTGCCTCACTT
ACGAAATCCTGACATACTTGTTGGTGAAAATGACCTCACAGCCCTCAGCTATCTTCATGAGCCTGCTGTGCTC
CATAATCTCAGAGTCCGCTTTATTGATTCCAAACTTATTTATACGTATTGTGGTATAGTCCTAGTAGCTATAA
ATCCCTATGAACAGCTGCCTATTTATGGAGAAGATATTATTAATGCATACAGTGGTCAGAACATGGGTGATAT
GGATCCACATATCTTTGCAGTAGCTGAAGAAGCTTACAAGCAAATGGCCAGAGATGAACGAAATCAGTCCATC
ATCGTAAGTGGAGAGTCTGGGGCAGGAAAAACAGTCTCAGCTAAGTATGCCATGCGATACTTTGCAACTGTGA
GTGGTTCTGCCAGTGAGGCCAATGTGGAGGAAAAGGTCTTGGCCTCCAACCCCATCATGGAGTCCATTGGAAA
TGCTAAAACAACCAGGAATGATAATAGCAGCCGTTTTGGGAAGTATATTGAGATTGGTTTTGATAAGAGATAT
CGAATCATTGGTGCCAATATGAGAACTTATCTTTTAGAGAAATCCAGAGTGGTATTCCAGGCAGAAGAGGAGA
GAAACTATCATATCTTCTATCAGCTTTGTGCCTCAGCAAAGTTACCTGAATTTAAAATGCTACGATTAGGAAA
TGCAGATAACTTTAATTACACAAAACAAGGAGGCAGTCCTGTGATTGAAGGAGTGGATGATGCAAAGGAGATG
GCACATACTAGGCAGGCCTGCACTTTGCTAGGAATTAGTGAATCTCATCAAATGGGAATTTTCCGAATACTTG
CTGGCATCCTTCACTTAGGCAATGTTGGATTTACATCCCGAGATGCAGACAGCTGCACAATACCTCCCAAGCA
TGAACCTCTCTGCATCTTCTGTGAACTCATGGGTGTGGACTATGAGGAGATGTGTCACTGGCTCTGCCATCGG
AAACTGGCTACTGCCACAGAGACATACATCAAGCCCATCTCCAAGCTGCAGGCCACGAATGCCCGCGATGCTT
TGGCCAAGCACATCTATGCCAAGCTCTTTAACTGGATTGTAGATAATGTCAATCAGGCTCTCCATTCTGCTGT
CAAACAGCACTCTTTTATTGGTGTGCTAGACATTTACGGATTTGAAACATTTGAGATAAATAGTTTTGAACAG
TTTTGCATAAATTATGCAAATGAAAAACTACAGCAACAATTCAATATGCATGTCTTCAAATTGGAGCAAGAAG
AATATATGAAGGAACAAATTCCATGGACACTCATAGATTTTTATGATAATCAGCCTTGTATTAATCTTATAGA
ATCAAAACTAGGCATTCTAGATTTACTGGATGAGGAATGCAAGATGCCTAAAGGCACAGATGACACCTGGGCC
CAAAAATTGTACAACACACATTTGAACAAATGTGCACTCTTTGAAAAGCCTCGTCTATCAAACAAAGCTTTCA
TCATCCAACATTTTGCTGACAAAGTGGAATACCAGTGTGAAGGATTTCTCGAAAAGAATAAAGACACCGTTTT
TGAAGAACAAATTAAAGTTCTTAAATCAAGCAAGTTTAAGATGCTACCAGAACTATTTCAAGATGATGAGAAG
GCCATCAGTCCAACTTCAGCCACCTCCTCAGGGCGCACACCCCTCACACGAACTCCTGCAAAGCCCACCAAAG
GCAGACCAGGCCAAATGGCCAAAGAGCACAAGAAAACAGTGGGGCATCAGTTCAGAAACTCCCTGCACCTGCT
TATGGAGACACTCAATGCCACTACCCCTCACTATGTGCGCTGTATCAAGCCTAATGACTTCAAGTTCCCATTC
ACGTTTGATGAGAAGAGGGCAGTGCAGCAGCTGAGAGCATGTGGTGTCCTGGAAACCATCCGAATCAGTGCGG
CCGGTTTCCCCTCACGGTGGACTTACCAAGAATTTTTCAGCCGCTACCGTGTCCTAATGAAGCAGAAAGATGT
GCTGAGTGACAGAAAGCAAACATGCAAGAATGTGTTAGAGAAACTGATACTGGACAAGGACAAATACCAGTTT
GGTAAGACAAAGATCTTTTTCCGTGCCGGTCAAGTGGCCTATCTAGAAAAATTGAGAGCTGACAAACTGAGAG
CTGCCTGCATCCGGATCCAGAAGACCATCCGAGGGTGGCTGCTGAGAAAGAAGTACCTACGCATGCGGAAGGC
AGCCATCACCATGCAGAGATACGTGCGGGGCTACCAGGCCCGATGCTATGCTAAGTTTCTGCGCAGAACCAAG
GCAGCAACCATCATTCAAAAGTACTGGCGCATGTATGTGGTCCGCAGGAGGTACAAGATTAGACGAGCTGCCA
CTATCGTTCTTCAGTCTTACTTGCGAGGCTTCTTGGCCAGAAATAGGTATCGCAAGATACTCCGTGAGCACAA
AGCAGTCATCATTCAGAAGCGAGTCCGGGGCTGGCTGGCCCGCACACACTACAAGAGGAGCATGCATGCCATC
ATCTACCTTCAGTGCTGCTTCAGGCGGATGATGGCCAAGCGTGAGCTAAAGAAGCTCAAAATCGAGGCTCGCT
CAGTGGAGCGCTATAAGAAGCTGCACATCGGCATGGAGAACAAGATCATGCAGCTGCAGCGCAAAGTTGATGA
GCAGAACAAAGACTACAAATGCCTTGTGGAGAAACTAACCAATCTGGAAGGAATATACAACTCTGAGACTGAG
AAACTACGAAGTGACTTAGAACGTCTTCAACTAAGTGAAGAGGAAGCGAAAGTTGCCACTGGGCGGGTCCTTA
GTCTGCAGGAAGAAATTGCCAAGCTCCGGAAAGACCTGGAGCAAACTCGTTCAGAGAAAAAATGCATTGAGGA
ACATGCAGATCGATACAAACAAGAAACAGAGCAGCTGGTATCAAATCTGAAGGAAGAAAATACTTTGCTGAAG
CAAGAAAAAGAAGCCCTCAATCACCGCATCGTGCAGCAGGCTAAGGAGATGACAGAAACTATGGAGAAGAAGT
TAGTAGAAGAAACGAAACAACTGGAACTCGACCTTAATGATGAAAGGCTGAGATATCAGAACCTTCTGAATGA
GTTCAGTCGCCTGGAAGAAAGATATGATGACCTCAAGGAAGAGATGACCCTTATGGTGCATGTGCCTAAGCCT
GGACACAAGAGAACAGACTCCACCCACAGCAGCAACGAGTCTGAATATATCTTTAGCTCTGAAATTGCAGAAA
TGGAAGACATTCCATCAAGGACAGAGGAACCAAGTGAGAAGAAGGTACCTCTGGACATGTCATTGTTCCTTAA
GCTCCAGAAGCGGGTCACAGAGCTGGAGCAGGAGAAGCAGGTGATGCAGGATGAGCTGGACCGCAAGGAGGAG
CAGGTGCTCCGCAGCAAGGCCAAGGAAGAAGAAAGACCACAAATTAGAGGTGCAGAACTGGAATATGAGTCAC
TCAAGCGTCAAGAACTAGAATCAGAAAACAAAAAACTGAAGAATGAGCTAAATGAGTTGCGCAAGGCCCTCAG
TGAGAAAAGTGCCCCAGAGGTGACCGCCCCAGGTGCACCTGCCTACCGTGTCCTCATGGAGCAGCTGACCTCT
GTGAGCGAGGAGCTTGATGTCCGCAAGGAGGAAGTCCTCATCTTAAGGTCTCAACTGGTGAGCCAGAAAGAGG
CCATCCAACCCAAGGATGACAAGAATACAATGACAGATTCCACAATACTTTTGGAAGATGTACAAAAAATGAA
AGATAAAGGTGAAATAGCACAAGCATACATTGGTTTGAAAGAAACAAATAGGCTCCTGGAATCCCAGCTGCAG
TCACAGAAGAGGAGCCATGAGAATGAGGCCGAGGCCCTCCGTGGGGAGATCCAGAGCCTGAAGGAGGAGAACA
ACCGACAGCAGCAGCTGCTGGCCCAGAACCTGCAGCTGCCCCCAGAGGCCCGCATTGAGGCCAGCCTGCAGCA
CGAGATCACCCGGCTGACCAACGAAAACTTGGATTTGATGGAACAACTTGAAAAACAGGATAAGACGGTCCGT
AAACTGAAAAAACAACTGAAAGTATTTGCCAAAAAAATTGGCGAACTAGAAGTGGGCCAGATGGAGAACATAT
CCCCAGGACAGATCATTGATGAACCCATCCGACCAGTCAACATTCCCAGGAAAGAAAAGGATTTCCAAGGGAT
GCTGGAATACAAGAAGGAGGATGAGCAAAAACTTGTTAAGAACCTGATTCTGGAACTGAAGCCACGTGGTGTA
GCAGTCAATTTGATTCCAGGATTACCGGCATATATCCTGTTCATGTGTGTTCGACATGCTGACTACCTGAATG
ATGATCAGAAAGTAAGGTCGTTGCTAACATCAACAATTAACAGCATCAAAAAAGTATTGAAGAAAAGAGGTGA
TGATTTTGAAACCGTCTCCTTCTGGCTCTCTAACACATGCCGATTTTTGCACTGCTTGAAACAGTACAGTGGA
GAAGAGGGCTTTATGAAGCACAACACATCTCGCCAGAATGAACACTGCCTCACCAATTTTGACCTGGCTGAGT
ATCGGCAGGTGCTGAGTGACTTGGCCATTCAGATCTACCAGCAGCTCGTGCGGGTGTTAGAGAACATCCTTCA
GCCAATGATTGTCTCAGGCATGCTGGAACATGAAACGATTCAGGGCGTGTCTGGGGTGAAGCCCACAGGGTTG
AGAAAGCGAACCTCCAGTATCGCCGATGAGGGCACCTACACACTGGACTCCATCCTCCGGCAGCTCAACTCCT
TCCACTCGGTCATGTGTCAGCATGGCATGGACCCTGAACTGATCAAGCAGGTGGTCAAGCAGATGTTCTACAT
CATAGGGGCCATCACCCTGAACAACCTTCTCCTGCGGAAGGACATGTGCTCCTGGAGTAAAGGCATGCAGATC
AGGTACAATGTCAGTCAACTGGAAGAATGGCTGCGTGACAAGAATCTGATGAATAGTGGGGCTAAAGAAACCC
TGGAACCTCTCATTCAGGCTGCTCAACTTTTGCAAGTGAAAAAGAAAACAGATGATGATGCAGAAGCCATTTG
TTCTATGTGCAATGCTTTAACTACTGCCCAGATTGTGAAAGTGTTGAATTTGTATACTCCAGTTAATGAGTTT
GAAGAAAGAGTCTCTGTGTCGTTCATTCGTACTATACAGATGCGTTTACGAGACAGGAAAGACTCTCCCCAGC
TGCTCATGGATGCTAAACACATCTTTCCTGTCACCTTTCCTTTCAACCCATCTTCCCTCGCACTAGAAACCAT
CCAGATTCCAGCCAGCCTCGGCCTGGGCTTCATTTCACGGGTCTGAAAGTGATGTCCAGGCAAAAATTGACAA
TACATTTCTTGCCCGAAATAAGAACCCATTATTTCCAGTGAGTTACTGAAAATACATTTTTAAAGAGAAAGTA
CTGATTATCTCCCAAATGAGAAGTCATTAACTGGAAATCTCCCTAGAATACTTTCATCACTTTGGAAACAAAG
ATAGGCTCTTTCGTGCTGTGTTATCTTTATAGCAACACTCATCCTTAACCAACTAGGTACCGTGAGTTTACAT
ACAGGAGAATGATGGAAGGAAGGGAGGAAGGAAAGGAGGAGAAAAATGTGTCTTCAGCTGGCAGCATTTATTT
TAAATCCTTAGCACTGAGTTTGAATGGTATAAAAAGTATAACTTCCATAGATGAGCTGTTGTTAGGAAGGCAC
CAAAGAACCTCCTCTGCACTAAACAGGAGAATGGAAAGAAAAGTCTCCATTGAGTACATATCATGTCAGTTTA
GTAATCAATTATGTTGATATTGTTAAACTGGTTCAAAGAAATAAACTGGCAATATGTAAAGTAATTCCTCATT
TGTGTCACTATGATATAGAGATATTAAAGGAATGTTGGTTTGCTAAATAGTATAGATGTCCATTTGTACTATA
GTTTACTGAGCATTTTAAATTGCTGCTACATACTGTCTTCTTAAAATGTAAGTGATATTAGGCACTACAATAA
GTTTCTCTTGTCAATTCTGTTTACAATTCAATCAGATCACAGTTTTAACTGGATTATATGCAAATACCTACAG
ATTCACCTGCACAAGTAGCAGACACTGGAAAGTCATGTAGTAATATGACAAAATGCTTGACATTTAGGGGTAG
GATTAGACAAAGTGGCTATTGTTGATGTCATTATTTATTCAGGATGTATTACATTGATGTGCTCATTAATTTT
CCCTGGGTGGATATTGCGTCAGGGTACAGTGTTCTGTGAAGTGACTTATTTTTAACTACCAGATCTGATTCCT
TCAGTGCATATTTTCAACCTTGACAGGTTTTCTCTCTTCTTAATTTATTAAGAATTAATCTCGGCTGGGCGCG
GTGGCTCACGCCTGTAATCCCAGCACTTTGGGAAGCCAAGGTGGGCGGATCACTTCAGGTTAGGAGTTGGAGA
CCAGCCTGGCCAACATGGCGAAACCCTGTCTCTACTAAAAATACAAAAATTAGCCGGGCGTGGTGGCACTTGC
CTGTAATCCCAGCTACTCGGGAGGCTGAGGCACGAGAATCGATTAAACCTGGGAGGCGGAGATTGCAATGAGA
TCGAACCACTGCACTCCAGCCTGGGTGACAGAGAGAGACACTGCCTTGGAAAAAAAAAGAATCTCACTCACTA
TCTAGAGAGGATTGTCAGAATATTCACGATTCAGGTCTTGAAACTTTGATTATGCAAAAGAAGGTATATAATA
AATATTTCATTATGATTCAGTTTTTAAGGCTTTGCAGCTTCTATAAGTGTTCTCAGATGCCACTAGATAATTT
TAAAAGCATCATATTAGAAATACTTTAAGAAGACTTATATAAGAAATAGAAGATTGTTGAATTTTACAGAGGA
TTTGGTTCATTAAGACCCAGATTCTGTAAGTTTTCATTCTGAAATTCTAGTTAAACATATTCACCATTTTTCT
TAGGAATCTTATACAATAAATCCTTCAGGTTGCACAAAAGCAAATTATTAGTTTTCATTAGAAACTCTGGTTC
TGAATTACAATCATAGGTTATATAAATTTAACTGTTAGATGGTCTATAAATCTTATTAAAATATGTGCAATAT
TTATGGAAGTCAAACAGCTTCATATCAGTGATAAAGATTGTTATTAAAAGATAAATACTGTCTGTTAATTTAC
ATGGGCCTCAAGTTCCTCGTTTATAAAATAAGAGAGTTGGACACTGATTCTTAACATCTCCTCCACATTTAAA
ATTCTCTCTTCTCAGCCCTTAGATTCTAGAGAGAAAAAGCTGCAGTTACTCAGTAAGTCCATTCTCTGATGGA
AAGACCAGTGTGTAGTGCCTGTCAATTCCTTAGGATTAATCAAATGTAAAATCACAAGTTTGTGTAGCTGTAA
CCTTTCTTAAATGTACATGATTTATGTACATGCTTTTAGAAGGTCCTACTATATTTGTATTATAATTAGTTTA
AGTAATTTTTATTACATCATGTATTGCTTTATTCAGTTTGAATACATTTATTTATTTATTTGCAGTATCAACC
AGAAACACTACCAATTGCATCAAATTCTCCCAGTTTTTCCTGGTTGTCAATGCGGTTTTCAATGCACAATTAA
GTCATAGCCATTTGGTTCGTACCAAATGTGTCAGAATCTAACAGCATCCGATAGGCTGTAAGTTGGGGAGTTG
CTAAGAAAATGCAACGTGGTACAGGCTGTCCGCCTCAGCCCTGGAAATCTCCCAGACCTCCCCCAGCTTCATC
CTGTGTAGCACGACTCAACGTGCACCCTGAATCTTCTCAGGTCTTCCAGGTCATGCTGTAGCTGTCACTGCCA
TGCAGCCCTTTTTTTTACTCCGGACAGCTCATGTACTGAAGCGTCATGAAAGAAAGGCTGTGGTCTGAGCCCT
TCTCTCCCATCTCCTGTCTTTGTCCTGTCAAGTGCTGGAGCCAGAGCTCCTACAGCTGCCCTTGGTGGTTTCT
CCTGTTCAGCGATGGTGGCACAAAGGTTCTGCTATTCCAGGGCTCCAGCTTCCTCCCAGGTCTACCCAGAGCT
CCAGATGGGGGTCTGAATTAACCTCTCTTGGTGGCCTGGAGATTTTTAGTCATTGACAAGAATACCTTGTAAC
CAGGGAACCCCAAGGCCCAGTAAATGATTCTGTATACCATTTTCTTGAAGGTACAAGAAGATTCTGCCGACTA
TGGGGATCTTTGGGCCAGTTTGAGGATTGCTTTCCCTCTGAGGTTCTTTCTCTCTGTCAGCCACACTTTCTCA
CCCAACTTCAGACACACCCTGCCAGCCTTTCCCCTACTCATTCACTCTTCCCCTTCCCTCAACTTAATCGTCT
ATCCCGTTGCCTGCTGTTTGACTGTGCACTGAAGGCAGGTGGATGGAGTCAGTCCTCAGTTGCCCCTGCTGGC
CTTCCTGGTGCTTACCATCAGCCCAATCTTTGCACAGTCCTTGTTGTTCTTACTTCTCTGCATGCATTCCTTC
AGAAGATCAGTCATCAACTTTTTCTTAATTCCTCTGTGACACACAATGGGAATTCAAAGGAAGAGATCTTAAA
AGTCACAACAGTTCTTTATCTTAATAATCCCCTCCCCATTCACCTTACTACATGCAGACTCACCTCACACCCT
TACAACTTGAAGCTGAAAATTTAAAAGTAATTTCCCTTTTTGCAGCTTTTCCTCAGGTTAAGGCTTTGATCTG
CCTGAGAGTAACTCTAAAAGGAGGGAAGATAAATATGGGATAAAATCCACAAAGTGTAGCTTCTAATTCCTTT
GGAAGTTTAAAAAATTTCCACATATCTGATGCTTCTTTTGTCAGGTGCAGAAGCACAAAAACATATTCCGAAG
CCAACTGATAGGGAATTTGGGGATTATTGTCAGTTTGGAGAATTTGCTGTGTTATTTCTTCATTTCCATGGAT
AGCTCATAGTTGGCTCTTTCTGGGTGAGTAATTATGTGTAATATAGATCAAATCTTTTACTAAGGTTACAGCT
ACATGTTAGGGGAGGCTATGAAAATACTATATTATTATAATTTCAGTGCAGTGATTGTTGTGAGAAATAACTT
TCATGGTAACCCTAGGAAAATGGGCACCTGCCACCATCCTGAGAAGTCCTCACACAATGCCCTTTCTCTCTTA
CACACACACACACACACATACACACACACACACCCCCGTCACTAATTCATAGAGTTCCTTAGCAGGCATAGTC
AAGGATCCTCTGGGTAATGTCAGCTGCTTAGTGATAAAACAGAGCCAAAACTAGTGCATCCTGTTGAAAGTAA
TGCAGAAACAGTACCTGGGTCCAGATATGCTTTCCTGCGGCGCTTTCCTCTGTTACCTCGTTTCATCCTCACA
GCAGCATGGACGGTAGGTGGGGTCGCTTCTACAATCATTTCTGATGATAGCTTGGGAATAGAGATAGGGGCAG
TGACTTGCCTGATGTCGCACAGCCCTCTGGCTGTCCTGCTTTCCCATATGGAGCAGTGGTGGTGTGGGCACCT
GTGATGCAGGAGACTTTAAAAATGTCGTGAGGTCACGTGCTGCCCCTCCTGGTACGTGTGGAATGCCCCTGGC
CAGCAAGGGGTGCTTTTTTATCAGAGTTGGCAGCTGGCATGTGGGAACCGAGCAAGTGCTGCGTACCAAGTTA
CTTGTTTTAAGGAGACCAAGTGCTCAGCGCCAGGTGGTTTTCTTTTTTGTCATAGTTACTTGCTATAACTCAG
CTTGACTTCTGTCATGAATCAGTGCTCTCTGGGAGGATGCAATACTCTGTTTGGGCATTAATTGGTAGCAGGT
TGTCTCAACCAAAAAGACAGGAAACAGCAAAAGCCTCTCTGAAATTAAGAGGAAAGTTACTCTCCCCACACCC
ATCAGAGTCTTTATTGGAGCCACCAGGTGAGCTGTGCAGCCTGGACAGGCCTGCAGCTATAGGCCACCTTCCC
AGTTTAGGTCCTCAGCACAGGGGAGCCCAAGTCACTGGGTGCCTTCCGAGGGCTGTCACTGGGCAGGCCATAT
ACAAGTCAGTGTGTGCGTGGGCACTGCAGTGTGTGCATGCCGTAGGTGTTGATGGGTGCTAGGAGGGGTGTCG
TGTGCATGCGCGTTGAAGAGGATCTGTATTGCCGTGACCTCTGTTCATGGATGAGTGCATTGTAATTTGTTCT
CAGGCTGTGCTGTGAGGGCCGCCTTAACCCTTGCTCCCTTCCCTTCTAGAGCTGCCTTAAGTTCTCCAGAACT
TTTCTTCTGTAAAGGATATCTTGCCTGGAAGGGATATCTTGCCCTGTTTCTCAAGGTTTTGTGAGAGTTTTGA
CTGGATGTGGCCCTGCATGACCCTCCTTCTCCTGTACTTCCTCTTTCCTTTCCAAATGGGAATTAGAACTGTG
GGGCAGCAACAGTCTCAGAGCCAGTGAGAGGCCAGCTTAGAGAATGCTTCTGAGTTAGTGGGACTCTGTGTCA
CAAGTAAGCAAATGAATATATGAAAGAAATTATGGAGATAAGTTAGATTCTTGGTAATACTTAAATGTCTTGC
TTTCTACTAACCTTTTGTTACTAAAGGTAAAGGGTATAACTCAAACTTTTTGTGGACATTCTTTTCAAAATTT
TTTAAGAACCCTGTACTATAAAAGGTTGAGTAAAAACAGGAAAGCGTGCTATAAGTTCAAATCTGTTGTATTA
CCCTAAATTAGATAAACCAACCTGAATTATAGTAGATTTCTCAATAGATGAGGAACTGAAAAATACTATGTAA
AATATCTTCCAAAATGCTTTTTATACTTTTTTTATTTGTAATTTGGTCTATCTAAAATGTTCGTTAGCTTAAC
TTAATGGGCGTTATTGGATTCATATGACTAACGTTTCCTCAGTATTGTAATGCTTGAAATATTTGAAAGAAAA
AATGTTGTTTTTTAGTTGAAACTGGTATATATAATTCAGTGCTTGGCAGGTTAGTATATTTTTATGCATTTTT
CAGAGTCAGCAGTTTCAAATCTTATTGTTATCATGTTATAAAATTTTAGCCCACATTTCAGGCTCCGTAAATC
ATTTGAGCCATTATTTTTTCCCAACAAATGGTGAATTTTTTCTTTAAATGTGGATATATATGTTGTAATTTAT
GATTCCTGGTTATGTATTTTTGTGGGATCCTGCAGTAAAATTGACTTTTTTGTGTCTTTGGGAGATTTAAATT
GCGCTAACAGTGTTGCGCAAAAATGAGTTCATGCCATTTAACATATTGTATTTTAATTATTAACTGTATTAAT
TTACTATGAAATGGACATCCTTTTAACTAAAATGGAATTGAACATTGCAGTTTTCAAATATTTTTCCTTGTTG
GGTCTGGAAAAGGAATTCTACTTTGATCTGCATAGAAAATTTTGATACAATTTTTTGAAAGTTCTTAGGTGAA
ACATTTACCCATTAAAAAGGAAGCAGAAATACTGAGACATGAAAGGCATTATCAACTAACTCTAGACTCTAGA
ACCCATTCTAGCATATCTCACGTGCAATTTTTAAAAATAAGTTAATAATTCATCTCATATCAACAAAAGCCTT
TGAAACATGGGTTTTCACTAGATATCACCTAGTGCTAAGATAAAAACCAAAACAATATCAGAATTACATTTAT
GCTCTAAATTTGTAGTTGTCCATTGTTGTGCTTAGTAAATGTGTGTCATTAATGCTGTATTCTCCTAGCTATT
ATGGAAACTTGTTTAAATAAAGATATGGATAT
(SEQ ID NO: 173)
MAASELYTKFARVWIPDPEEVWKSAELLKDYKPGDKVLLLHLEEGKDLEYHLDPKTKELPHLRNPDILVGEND
LTALSYLHEPAVLHNLRVRFIDSKLIYTYCGIVLVAINPYEQLPIYGEDIINAYSGQNMGDMDPHIFAVAEEA
YKQMARDERNQSIIVSGESGAGKTVSAKYAMRYFATVSGSASEANVEEKVLASNPIMESIGNAKTTRNDNSSR
FGKYIEIGFDKRYRIIGANMRTYLLEKSRVVFQAEEERNYHIFYQLCASAKLPEFKMLRLGNADNFNYTKQGG
SPVIEGVDDAKEMAHTRQACTLLGISESHQMGIFRILAGILHLGNVGFTSRDADSCTIPPKHEPLCIFCELMG
VDYEEMCHWLCHRKLATATETYIKPISKLQATNARDALAKHIYAKLFNWIVDNVNQALHSAVKQHSFIGVLDI
YGFETFEINSFEQFCINYANEKLQQQFNMHVFKLEQEEYMKEQIPWTLIDFYDNQPCINLIESKLGILDLLDE
ECKMPKGTDDTWAQKLYNTHLNKCALFEKPRLSNKAFIIQHFADKVEYQCEGFLEKNKDTVFEEQIKVLKSSK
FKMLPELFQDDEKAISPTSATSSGRTPLTRTPAKPTKGRPGQMAKEHKKTVGHQFRNSLHLLMETLNATTPHY
VRCIKPNDFKFPFTFDEKRAVQQLRACGVLETIRISAAGFPSRWTYQEFFSRYRVLMKQKDVLSDRKQTCKNV
LEKLILDKDKYQFGKTKIFFRAGQVAYLEKLRADKLRAACIRIQKTIRGWLLRKKYLRMRKAAITMQRYVRGY
QARCYAKFLRRTKAATIIQKYWRMYVVRRRYKIRRAATIVLQSYLRGFLARNRYRKILREHKAVIIQKRVRGW
LARTHYKRSMHAIIYLQCCFRRMMAKRELKKLKIEARSVERYKKLHIGMENKIMQLQRKVDEQNKDYKCLVEK
LTNLEGIYNSETEKLRSDLERLQLSEEEAKVATGRVLSLQEEIAKLRKDLEQTRSEKKCIEEHADRYKQETEQ
LVSNLKEENTLLKQEKEALNHRIVQQAKEMTETMEKKLVEETKQLELDLNDERLRYQNLINEFSRLEERYDDL
KEEMTLMVHVPKPGHKRTDSTHSSNESEYIFSSEIAEMEDIPSRTEEPSEKKVPLDMSLFLKLQKRVTELEQE
KQVMQDELDRKEEQVLRSKAKEEERPQIRGAELEYESLKRQELESENKKLKNELNELRKALSEKSAPEVTAPG
APAYRVLMEQLTSVSEELDVRKEEVLILRSQLVSQKEAIQPKDDKNTMTDSTILLEDVQKMKDKGEIAQAYIG
LKETNRLLESQLQSQKRSHENEAEALRGEIQSLKEENNRQQQLLAQNLQLPPEARIEASLQHEITRLTNENLD
LMEQLEKQDKTVRKLKKQLKVFAKKIGELEVGQMENISPGQIIDEPIRPVNIPRKEKDFQGMLEYKKEDEQKL
VKNLILELKPRGVAVNLIPGLPAYILFMCVRHADYLNDDQKVRSLLTSTINSIKKVLKKRGDDFETVSFWLSN
TCRFLHCLKQYSGEEGFMKHNTSRQNEHCLTNEDLAEYRQVLSDLAIQIYQQLVRVLENILQPMIVSGMLEHE
TIQGVSGVKPTGLRKRTSSIADEGTYTLDSILRQLNSFHSVMCQHGMDPELIKQVVKQMFYIIGAITLNNLLL
RKDMCSWSKGMQIRYNVSQLEEWLRDKNLMNSGAKETLEPLIQAAQLLQVKKKTDDDAEAICSMCNALTTAQI
VKVLNLYTPVNEFEERVSVSFIRTIQMRLRDRKDSPQLLMDAKHIFPVTFPFNPSSLALETIQIPASLGLGFI
SRV*

[0147] An amino acid sequence for the protein encoded by the NFKBIA gene that is a regulator 60 of T cell exhaustion/dysfunction resistance is available from the UniPROT database at accession no. P25963, cDNA NM_020529, with gene location at Chr 14: 35401079-35404749.

(SEQ ID NO: 174)
ACAGCAGTCCGTGCCGCCGTCCCGCCCGCCAGCGCCCCAGCGAGGAAGCAGCGCGCAGCCCGCGGCCCAGCGC
ACCCGCAGCAGCGCCCGCAGCTCGTCCGCGCCATGTTCCAGGCGGCCGAGCGCCCCCAGGAGTGGGCCATGGA
GGGCCCCCGCGACGGGCTGAAGAAGGAGCGGCTACTGGACGACCGCCACGACAGCGGCCTGGACTCCATGAAA
GACGAGGAGTACGAGCAGATGGTCAAGGAGCTGCAGGAGATCCGCCTCGAGCCGCAGGAGGTGCCGCGCGGCT
CGGAGCCCTGGAAGCAGCAGCTCACCGAGGACGGGGACTCGTTCCTGCACTTGGCCATCATCCATGAAGAAAA
GGCACTGACCATGGAAGTGATCCGCCAGGTGAAGGGAGACCTGGCCTTCCTCAACTTCCAGAACAACCTGCAG
CAGACTCCACTCCACTTGGCTGTGATCACCAACCAGCCAGAAATTGCTGAGGCACTTCTGGGAGCTGGCTGTG
ATCCTGAGCTCCGAGACTTTCGAGGAAATACCCCCCTACACCTTGCCTGTGAGCAGGGCTGCCTGGCCAGCGT
GGGAGTCCTGACTCAGTCCTGCACCACCCCGCACCTCCACTCCATCCTGAAGGCTACCAACTACAATGGCCAC
ACGTGTCTACACTTAGCCTCTATCCATGGCTACCTGGGCATCGTGGAGCTTTTGGTGTCCTTGGGTGCTGATG
TCAATGCTCAGGAGCCCTGTAATGGCCGGACTGCCCTTCACCTCGCAGTGGACCTGCAAAATCCTGACCTGGT
GTCACTCCTGTTGAAGTGTGGGGCTGATGTCAACAGAGTTACCTACCAGGGCTATTCTCCCTACCAGCTCACC
TGGGGCCGCCCAAGCACCCGGATACAGCAGCAGCTGGGCCAGCTGACACTAGAAAACCTTCAGATGCTGCCAG
AGAGTGAGGATGAGGAGAGCTATGACACAGAGTCAGAGTTCACGGAGTTCACAGAGGACGAGCTGCCCTATGA
TGACTGTGTGTTTGGAGGCCAGCGTCTGACGTTATGAGCGCAAAGGGGCTGAAAGAACATGGACTTGTATATT
TGTACAAAAAAAAAGTTTTATTTTTCTAAAAAAAGAAAAAAGAAGAAAAAATTTAAAGGGTGTACTTATATCC
ACACTGCACACTGCCTGGCCCAAAACGTCTTATTGTGGTAGGATCAGCCCTCATTTTGTTGCTTTTGTGAACT
TTTTGTAGGGGACGAGAAAGATCATTGAAATTCTGAGAAAACTTCTTTTAAACCTCACCTTTGTGGGGTTTTT
GGAGAAGGTTATCAAAAATTTCATGGAAGGACCACATTTTATATTTATTGTGCTTCGAGTGACTGACCCCAGT
GGTATCCTGTGACATGTAACAGCCAGGAGTGTTAAGCGTTCAGTGATGTGGGGTGAAAAGTTACTACCTGTCA
AGGTTTGTGTTACCCTCCTGTAAATGGTGTACATAATGTATTGTTGGTAATTATTTTGGTACTTTTATGATGT
ATATTTATTAAACAGATTTTTACAAA
(SEQ ID NO: 175)
MFQAAERPQEWAMEGPRDGLKKERLLDDRHDSGLDSMKDEEYEQMVKELQEIRLEPQEVPRGSEPWKQQLTED
GDSFLHLAIIHEEKALTMEVIRQVKGDLAFLNFQNNLQQTPLHLAVITNQPEIAEALLGAGCDPELRDERGNT
PLHLACEQGCLASVGVLTQSCTTPHLHSILKATNYNGHTCLHLASIHGYLGIVELLVSLGADVNAQEPCNGRT
ALHLAVDLQNPDLVSLLLKCGADVNRVTYQGYSPYQLTWGRPSTRIQQQLGQLTLENLQMLPESEDEESYDTE
SEFTEFTEDELPYDDCVFGGQRLTL*

[0148] An amino acid sequence for the protein encoded by the PAK2 gene that is a regulator of T cell exhaustion/dysfunction resistance is available from the UniPROT database at accession no. Q13177, cDNA NM_002577, with gene location at Chr 3: 196739857-196832647.

(SEQ ID NO: 176)
GTCTTCCTCCCCCAGGGTTGTGGCCACGCGCAGCGGCGGCGGTTGTTCCGCTTCCCCTCCGGCCCGGGCCGTC
GCCATTGCCGAAGGCTCCCTCCCCTCCCCTCCCTGGCGTGCGCAGGACTCCGCCGCCGCTGGGCCTAGCGGTA
GCAGCGGCTGCTCCAGCGCGGCGTCTCTTCCCGCCCCGCTTCCCCTTCCCTCCCCTCCCCTCCCCGCACCGCG
CGCTAGCCCGGGGCGGCTCCGCAGCCCGCCGGGAGCTCTGACCGAGGCGCCTCGCTGGGGCGGGGACCTTGCC
TTGCCCGGGGCCATTTCATAATTCTGAATCATGTCTGATAACGGAGAACTGGAAGATAAGCCTCCAGCACCTC
CTGTGCGAATGAGCAGCACCATCTTTAGCACTGGAGGCAAAGACCCTTTGTCAGCCAATCACAGTTTGAAACC
TTTGCCCTCTGTTCCAGAAGAGAAAAAGCCCAGGCATAAAATCATCTCCATATTCTCAGGCACAGAGAAAGGA
AGTAAAAAGAAAGAAAAGGAACGGCCAGAAATTTCTCCTCCATCTGATTTTGAGCACACCATCCATGTTGGCT
TTGATGCTGTTACTGGAGAATTCACTGGCATGCCAGAACAGTGGGCTCGATTACTACAGACCTCCAATATCAC
CAAACTAGAGCAAAAGAAGAATCCTCAGGCTGTGCTGGATGTCCTAAAGTTCTACGACTCCAACACAGTGAAG
CAGAAATATCTGAGCTTTACTCCTCCTGAGAAAGATGGCTTTCCTTCTGGAACACCAGCACTGAATGCCAAGG
GAACAGAAGCACCCGCAGTAGTGACAGAGGAGGAGGATGATGATGAAGAGACTGCTCCTCCCGTTATTGCCCC
GCGACCGGATCATACGAAATCAATTTACACACGGTCTGTAATTGACCCTGTTCCTGCACCAGTTGGTGATTCA
CATGTTGATGGTGCTGCCAAGTCTTTAGACAAACAGAAAAAGAAGACTAAGATGACAGATGAAGAGATTATGG
AGAAATTAAGAACTATCGTGAGCATAGGTGACCCTAAGAAAAAATATACAAGATATGAAAAAATTGGACAAGG
GGCTTCTGGTACAGTTTTCACTGCTACTGACGTTGCACTGGGACAGGAGGTTGCTATCAAACAAATTAATTTA
CAGAAACAGCCAAAGAAGGAACTGATCATTAACGAGATTCTGGTGATGAAAGAATTGAAAAATCCCAACATCG
TTAACTTTTTGGACAGTTACCTGGTAGGAGATGAATTGTTTGTGGTCATGGAATACCTTGCTGGGGGGTCACT
CACTGATGTGGTAACAGAAACGTGCATGGATGAAGCACAGATTGCTGCTGTATGCAGAGAGTGTTTACAGGCA
TTGGAGTTTTTACATGCTAATCAAGTGATCCACAGAGACATCAAAAGTGACAATGTACTTTTGGGAATGGAAG
GATCTGTTAAGCTCACTGACTTTGGTTTCTGTGCCCAGATCACCCCTGAGCAGAGCAAACGCAGTACCATGGT
CGGAACGCCATACTGGATGGCACCAGAGGTGGTTACACGGAAAGCTTATGGCCCTAAAGTCGACATATGGTCT
CTGGGTATCATGGCTATTGAGATGGTAGAAGGAGAGCCTCCATACCTCAATGAAAATCCCTTGAGGGCCTTGT
ACCTAATAGCAACTAATGGAACCCCAGAACTTCAGAATCCAGAGAAACTTTCCCCAATATTTCGGGATTTCTT
AAATCGATGTTTGGAAATGGATGTGGAAAAAAGGGGTTCAGCCAAAGAATTATTACAGCATCCTTTCCTGAAA
CTGGCCAAACCGTTATCTAGCTTGACACCACTGATCATGGCAGCTAAAGAAGCAATGAAGAGTAACCGTTAAC
ATCACTGCTGTGGCCTCATACTCTTTTTTCCATTTTCTACAAGAAGCCTTTTAGTATATGAAAATTATTACTC
TTTTTGGGGTTTAAAGAAATGGTCTGCATAACCTGAATGAAAGAAGCAAATGACTATTCTCTGAAGACAACCA
AGAGAAAATTGCAAAAAGACAAGTATGACTTTTATATGAACCCCTTCTTTAGGGTCCAGAAGGAATTGTGGAC
TGAATCACTAGCCTTAGGTCTTTCAGCAAACAGCCTATCAGGGCCATTTATCATGTGTGAGATTTGCATTTTA
CTTTGCTGACTTTGTTGTAATAGATCCCATTCATTGTCCCCTTTGGGGTATTTCCAATACTTGAATGGCAGAT
TGGAGTTTTTCAGAGTATGTGTTTCATCTGCTAGTCTTTCTCTCCTTCATAGCTTTTCTTTTCCTGGACTTGC
TCCTTTTGAGTTGCTTTTGCGTTTCTCATGCCTAGGCAAGTGTAATAGAAATTATGTAGCTCCTTATGTTGGC
AAAGGAGCTCTATATAGTTTCACTTTGTATAAAAGTTAGGACCAGCTGTTGTTACATGTAATATTTTAGTTCA
GAACTTGACCTGAAGGAAGGGAAGAAAAGTATGTGATTTTTACCTTTTTTAACAAATGTGAAAAAGTCAGTTT
TAGAAATTTCGTGGTAGTAAGTTCGGCATTTGTTACATGTATAGAGAGAAGACTAATAATCTCTATTTATAAC
TAAATCATTGAGATAGAAAAAGATTCCCATTGACTGTAGACTTCTTCCCATTTTGTCTTCCCTTCTGCCTGTT
TCCCCTTCAGGCTTGGCTCTAGGAACCAAAGTGATTTGTTGTTGTTCCAACCTGGGCTTTGTGACTTTGGTTA
GTGCCACTACCTTCTTCCCTCCTTTCCCCCTTCAATTTGGAAATAAATTTCTGTATATGTTGCAATTTTAGGT
TTAGGTTTGTTCTTTTTCTTTTTCATTAATCCTCTCTCACCTCACAGATACCCCCTCCCATGGCAAATAATAT
AATAACCAGTGAATTTTCAGGAATTTAAAAATTAGCTTTTTTCCACTTAAAGGAGAAAAATATTTGGGACTAG
CAGCAGAGGCAGTAAGAGATGTGAACCTTGGTGAGCTCTGATACAGTGAGAAGAGATTATACTCATGAAAGAG
AATGTTAGTGTTACAGAGAAGCAGCCGATAGCAAATCGACTGTAGAGACTTGGCGGCGGTGGCATTGCCCCAG
GTCGTCAGCAGTGTGGTATTATCTATGAGAACTTGAGCGACAGAGTATTTCTTGATGAATTTATAGATCATTT
GAGATGTTGAGTTACTTTAGTTTAGTTTTGTTTTGTTTTTTCAAATAAGTAGAGACTATTGTAAAAAACGAGA
AAGGAAAATGAAATGTGCGTGTTGATAGCAATAATTTGTTTCTTTTAAAGATTCTAAAAGGTCTGAGACCTGT
AGCATTAATTATTTGAGTGCCCTCCCTTCTCCCCTCCCCTCCCTTTTCTCTTCTCTTTTTTCCTCTCCTCTTC
TTCTCCTTTATTCATTGTTTTGCTTTTGGAGTGGGTGTTGTTCAAGTATCTGTGGTTTGGTTCTGGCATTTTG
TTCCCACCATCCCCTTCCCCCATTAACTTCCCCCCTGCTTGCCATCCTGCAGTAGTATAAATCATGAATAAAA
AATAATTTTGCTGTTGTAGTATACATTGGAGAAACTGGCAGGTTTTATTTCCATTATTTTATTTCCACTATAT
CTATGATAAGATGCAATTATAAGGAGAGAAGTGACTGTTTTTTATTGATAAGGCAAGATTTTCAGAAAAATGA
GTAAAATAATTAATGAAACATATTTAGAGCACTTAATGGTCTCTGTTTTCAATATAATTCTTGATTTCATTTT
TCTCTGGAATATATTGGCCTTCTACAGCTATTACTGAATTATAGAAACTGGTTTATTTCTGGCAGAAAGCTGC
AGTGCCACCTGAGTTCCAAATTTTACCATTCTTTGTAAACAGTTGGATGGATTATGATAAAGAAGATGCTACC
AATGAAATAGAAAACCAACGAGATGAGAAGACTGTGATCCTCATGTACTCAGAGGCACTTCCCTCCTAAGTCA
AAGACCATCCTCACTGACTATGTGCCAACGCCTCGTTTCAGGCTTGTGACTCAACAAAGGGCTTTTCCATTGA
TAGAAGCAGTTTGGGATTTGTAGTTGCGACTTCTTCGATAGTTACCTGCACGTCCATTGCTGGCAACTGACTT
GTCATTAAAACCTGGCTCTTTGGTTAAGGGAGCTACGCTGTGGTTTATTCTTAAGTTACGTGGATAAACTAAC
CTCTAACAGAAATATACTTTGGTTAATTTTGAAATGTGTCATTTTTAAACAATCTTAAAAGTAATACAGAATT
GTGATTTATTAATTTTAAAACATTCAGAACTTGTTGAAAGAAAAATTATATCTGAATCAAGATTCATGTTTTT
TATTTTTATTTTTTTTGATACAGAGTCTCACTCTGTCACTCAGGCTGGAGTGCAGTGACATGATCTCAGCTCA
CTGCAACCTCCGCTTCCTGGGTTCAAGCAATTCTCATGCCTCAGCCTCCTGAGTAGCTGAGACCACAGGCACC
CGCCACCACACCCAGCTATTTTTTTGTATTTTTAGTAGAGACAGAGTCTCACCACATTGCCCAGGCTGGTCTC
CAACTCCTGAGCTCAGGCAGTCTGCCCACCTTGGCCTCCCAAAGTGCTGCAGTTACAGGCGTGAGCCACTGCA
CCTGGCCTCATGTTTTTTAAATAATTGCCTTTTATATTTACCCTTTTTGTCATCACTTTAGAATGAAAATTCC
CATTTAAATCTGAAAGTTACCTTAATAGTCCTCTTGTGTTATTAGGACAGTATTATTATAGTACTTATTTATT
TTATTTTAGATTTAAAGTTATCTTCTCTTTTTCTTTTTTCTTCTGCTGCTTTTAGGGACAATTAAAACTGGGA
AACTATGAAACATGGAACATTTTATCCTACCTGAAAGTAAACGAGTAATTGTGAAGCATAAGACACTGAGGCT
AATACAACTCTGTCTTCATGTGTTGACTGCCTGGCACATAGTATTCATTCTCTTCCCTTTAACATAGAAGTGT
CCAGCTGCGTACAGTCTAGTAACCAGCAACTGTAAACGAACCTGTGCCTCTAACAAGCGATTCTAAACCACCT
ATGAGTATTTCTTTTAGGGCTCACTTAAATACATGTTTGTATATACTGTATTCTAGCCAGAATAATTTTAGAT
CTGATCAGGTAGTAGCTAAAATTAGAAAAAAACAAAATAGATGCTTAAAGAATTTGCATCCATTTTTGAGTCT
AAATCTTTTAAAATATACTGAGATCCACATCTAGTGAAATGTCAGTGTCAAAATATTATAGATTATAGCTAAA
ATCCAGATTAATACTCATTTGGGGTTTTTTATAGTGGAACTTCATAGTAATACAAAAAGCAGATTGTCTTCCT
GTCTCCGCTGCTCCCACAGTAGGTATTGAAACTGGTAAAATCAGTTTTTTGATAGTGTGTGTATATAAGAAAA
AATAGATACACACATTCTTTTTTCTCAGTCAACACATTGATTGAACACTCTGGCAAAGATGCTGTGGTGGATG
AGGTTGGAGTTCGAAAGAAGAAGCAAGCGCTGGCCTGGCCTTGAAAGAACCGAAGTCTTTCCCATTCACTTCT
CTAGAAAGCTGCCAAGACAGAGGCAGAAAGAAATGGATGATAGTTCTGTCAAGCACACTTCTGTTCTCTTAGA
ACTTAGAAGTGTTTCTAAGAGAACAGAAGTAATAAGAGAAACAGTTACGTGTGGAATTCAACATCTTTGGTTG
GAACGCATTGGCTTTTTTTTTCTTGTTTTGATAGAAATGGAATTAAGCAAAAGTAGTTTTTGTCTTTTCTGTT
GTCTTCAAATTTTATGCCTTTTATTTTTAATTTAATCCCGTTCAATTATTTAATTGTTATACATTGACATTAA
CTGCTGTATTTTGACTTTGTTCAATAATTTTGTTCTTTCAGGGCTAGAAATAAACTTTTTAAAAAAAGTGTGC
ATTTTTCCCTTTCCTAAACTTTTATTCTTTCTTTTGATCAGCGTAAAAGAATATTTTAATGTCTTTTGATAGC
ATAAAAGAATATTTAAATGTCTTAATAGGTTTTCAAAGAACATTTAGTATTTTTAGTGATAAATGTTTTAAAC
CTTTTAA
(SEQ ID NO: 177)
MSDNGELEDKPPAPPVRMSSTIFSTGGKDPLSANHSLKPLPSVPEEKKPRHKIISIFSGTEKGSKKKEKERPE
ISPPSDFEHTIHVGFDAVTGEFTGMPEQWARLLQTSNITKLEQKKNPQAVLDVLKFYDSNTVKQKYLSFTPPE
KDGFPSGTPALNAKGTEAPAVVTEEEDDDEETAPPVIAPRPDHTKSIYTRSVIDPVPAPVGDSHVDGAAKSLD
KQKKKTKMTDEEIMEKLRTIVSIGDPKKKYTRYEKIGQGASGTVFTATDVALGQEVAIKQINLQKQPKKELII
NEILVMKELKNPNIVNFLDSYLVGDELFVVMEYLAGGSLTDVVTETCMDEAQIAAVCRECLQALEFLHANQVI
HRDIKSDNVLLGMEGSVKLTDFGFCAQITPEQSKRSTMVGTPYWMAPEVVTRKAYGPKVDIWSLGIMAIEMVE
GEPPYLNENPLRALYLIATNGTPELQNPEKLSPIFRDELNRCLEMDVEKRGSAKELLQHPFLKLAKPLSSLTP
LIMAAKEAMKSNR*

[0149] An amino acid sequence for the protein encoded by the PDCL gene that is a regulator of T cell exhaustion/dysfunction resistance is available from the UniPROT database at accession no. Q13371. cDNA NM_005388, with gene location at Chr 9: 122798389-122828588.

```
  (SEQ ID NO: 178)
GGCTTTTCTCTTTAGCGCTCAGGGCGCTGACCCACTGCTCTTCCTCTTAAGAAAGTGCTCCATTCCTTCCGGC
GCCCGGAGCTGCTGGCCCAAAGGGATCCGGAGCGAGCTAGGGCAGACACCATGACCACCCTTGATGATAAGTT
GCTGGGGGAGAAACTGCAGTACTACTATAGCAGCAGTGAGGATGAGGACAGTGACCACGAGGACAAGGACCGA
GGCAGATGTGCCCCAGCCAGCAGTTCTGTGCCTGCAGAGGCTGAGCTGGCAGGCGAAGGCATCTCAGTTAACA
CAGGCCCAAAAGGTGTGATCAATGACTGGCGCCGCTTCAAGCAGTTGGAGACAGAGCAGAGGGAGGAGCAGTG
CCGGGAGATGGAAAGGCTGATCAAGAAGCTGTCAATGACTTGCAGGTCCCATCTGGATGAAGAGGAGGAGCAA
CAGAAACAGAAAGACCTCCAGGAGAAGATCAGTGGGAAGATGACTCTGAAGGAGTTTGCCATAATGAATGAGG
ACCAAGATGATGAAGAGTTTCTGCAGCAGTACCGGAAGCAGCGAATGGAAGAGATGCGGCAGCAGCTTCACAA
GGGGCCCCAATTCAAGCAGGTTTTTGAGATCTCCAGTGGAGAAGGGTTTTTAGACATGATTGATAAAGAACAG
AAAAGCATTGTCATCATGGTTCATATTTATGAGGATGGCATTCCAGGGACCGAAGCCATGAATGGTTGCATGA
TCTGCCTTGCCGCAGAGTACCCAGCTGTCAAGTTCTGCAAGGTGAAGAGCTCAGTTATTGGCGCCAGCAGTCA
GTTCACCAGGAATGCCCTTCCTGCCCTGCTGATCTATAAGGGGGGTGAATTGATCGGCAATTTTGTTCGTGTT
ACTGACCAGCTGGGGGATGATTTCTTTGCTGTGGACCTTGAAGCTTTTCTCCAGGAATTTGGATTACTCCCAG
AAAAGGAAGTCTTGGTGCTGACATCTGTGCGTAACTCTGCCACGTGTCACAGTGAGGATAGCGACCTGGAAAT
AGATTGAACTGATAGTCTAGTTGCATAGATTTCTCATTGTTTGGGTTGGAATACACGTCATTGTTTATTTTTG
TTCCTTTGTCTTCTGGCTTTTCAGCTGTTCTTTGTAGTCCCTTTTATTATGCATAAAATAAAGAAATTCTTAG
ATTAAATCAGAATGCTGAATAACCTTGTAGCTAGCAATAAGGTGACTTACAGTTGTATAAACAGGAAGCCAGG
CTTTTGAACTGTTTACTTAAGATTCTGTGGTGTGACATCTCTGTTATTGTTTCCAGTCAATATTTACAAAGCA
TCCTAAAGACAGGGTCTTGGAAATTGTCTTCAGATGATCTTAGAGGTCTCTGCCAAGTCTGAGAGTATAATTC
TGTAGGTATTGTGTTATTTGCAACGTAAATAGTGCATTTTCTTAATCAAATGATTGTAAATTATATTTACTTG
TAATCAGTTCCATAGCTTTAGACGGTGGTTAGATTTTTTTTTTCCCCACCAGGGTCTTGTTTAAAGGGGTGAG
CCACCGCACCCAGTCCTGAGGGGTGGCCTCTGCTGCTGGATTTCATGTCTTCCTCCAGCATGACTAAGTCTGG
AACAGCAGGAAGGGTTGATGCTTACTGACCTGGTGATGTTAGAAGACAAGTAGTTTATGGATTTAAACATTAG
AGCTGGAGTGGGGCTGGAAATCTTTGTAAAGGAAGTTCTTTCAGTAAGATGCCCCTGCTTGTCTTTGTCTCTT
TTTTGTTTAACAAGGTAACTTTTTGTTTAACAAGGTAACTTTTTGTTTAACCTAGATTTTTTTTAAAACTTTT
TTTTTTTTTCATATTGGAAAAGTAATTCATATTCAGTAGAGGAAAACTGACCAAAACAGAAGCAAAAATAAGA
AAATTAAAATAATCTCTAATCCTACTACCTAGAATAAAACACTATTAATATTTTGGTCTGTTTCCTGCCAAGG
TGTTTTCTGTGTATACATGGATATTTTGTTTGTTTTTAAACAAAACGATGGGATCATTCTGAACATACTGTTC
TATAGTATGGTCAGCTAATAATATATCAGACCTTTTTTTATATTATTAAATATTCTACAACTTTTTAAAAATG
TCTATTAATATTCCATCGTATAGATGTGATATAATTTGCTTGATGGTTGTCTCTTAAAAAGAAAGATAGCAAA
TACTTTTTTTAAATTACAAAAGTGATAGATGTTCATTGTAGAAAATGTAATAAACACTGTTAAGACTTAAAAG
CCATATAATTCCACCAACCAAAATTAATCCCTTTTGTCATATTTCTAGTCATTTTTATAGCCTTTTTTTCTAT
GTATTTATAATAATTATCATTTGCGTTTTTTTCCTTTTTTTAACTTTAAAAATGTATATTCTAGGGTCAGGGG
AAATGTAATCTGGAATTAAATATTAGCCTTAAAATTCACAATTTTGATTTTCCTGGCTTTTCAGGAATTGACT
AACTGTAAAAGAGTCTTGAAAGTATTTAGTCAACAAACAGAGTGCATTTTTTTTTTTTTTGACTAAGAAAGCT
CGTTGTAGTAGAAAGGGTGGAATGTATTGAAAATTATTAGAAGCAGGGAAGTATTGTTAGTCTAGCTTATTTC
CTTTCAGTCTTTTTTCAATATTTTTATAAACATTGAGTACTTACTGAATTTAGTTCTGTGCTCTTCCTTATTT
AGTGTTGTATCATAAATACTTTGATGTTTCAAACATTCTAAATAAATAATTTTCAGTGGCTTCATAATATTTC
ATCATTTGGATATATAATAATTTATTTAACCAGTCTCTTTATTTTTATTTATTTATTTTGTTTGTTTTCTTTG
AGATGGAGTCTCGCTCTGTCACCCAGGCTGGAGTACAATAGCGTGATCTCGGCTCACTGCAACCTCCACCTCC
TGGGTTCAAGCAGTTCTCCTGCCTCAGCCTCCTGAGTAGCTGGGACTACAGGCACATGCCATCACGCCTGGCT
AATTTTTGTATTTTTACTAGAGAC
  (SEQ ID NO: 179)
MTTLDDKLLGEKLQYYYSSSEDEDSDHEDKDRGRCAPASSSVPAEAELAGEGISVNTGPKGVINDWRRFKOLE
TEQREEQCREMERLIKKLSMTCRSHLDEEEEQQKQKDLQEKISGKMTLKEFAIMNEDQDDEEFLQQYRKORME
EMRQQLHKGPQFKQVFEISSGEGFLDMIDKEQKSIVIMVHIYEDGIPGTEAMNGCMICLAAEYPAVKFCKVKS
SVIGASSQFTRNALPALLIYKGGELIGNFVRVTDQLGDDFFAVDLEAFLQEFGLLPEKEVLVLTSVRNSATCH
SEDSDLEID*
```

[0150] An amino acid sequence for the protein encoded by the PIK3R5 gene that is a regulator of T cell exhaustion/dysfunction resistance is available from the UniPROT database at accession no. Q8WYR1, cDNA NM_001142633, with gene location at Chr 17: 8878911-8965712.

```
  (SEQ ID NO: 180)
AGATGCTGCGGCTCGCCGCGCGGCTCCAGCTGGGGCGCGGTGGTCCCGACGGTCACCCGAATCGCAGGGAGTC
GCCGCTGGAGAGGGGCTCGGCGCCCGGCGGGGACTGCAGGCGATGACCCAGGATGCAGCCAGGGGCCACGACA
TGCACGGAGGACCGCATCCAGCATGCCCTGGAACGCTGCCTGCATGGACTCAGCCTCAGCCGCCGCTCCACCT
CCTGGTCAGCTGGGCTGTGTCTGAACTGCTGGAGCCTGCAGGAGCTGGTCAGCAGGGACCCGGGCCACTTCCT
TATCCTCCTTGAGCAGATCCTGCAGAAGACCCGAGAGGTCCAGGAGAAGGGCACCTACGACCTGCTCACCCCG
CTGGCCCTGCTCTTCTATTCCACTGTTCTTTGTACACCACACTTCCCACCAGACTCGGATCTCCTTCTGAAGG
CAGCCAGCACCTACCACCGGTTCCTGACCTGGCCTGTTCCTTACTGCAGCATCTGCCAGGAGCTGCTCACCTT
CATTGATGCTGAACTCAAGGCCCCAGGGATCTCCTACCAGAGACTGGTGAGGGCTGAGCAGGGCCTGCCCATC
AGGAGTCACCGCAGCTCCACCGTCACCGTGCTGCTGCTGAACCCAGTGGAAGTGCAGGCCGAGTTCCTTGCTG
TAGCCAATAAGCTGAGTACGCCCGGACACTCGCCTCACAGTGCCTACACCACCCTGCTCCTGCACGCCTTCCA
GGCCACCTTTGGGGCCCACTGTGACGTCCCGGGCCTGCACTGCAGGCTACAGGCCAAGACCCTGGCAGAGCTT
GAGGACATCTTCACGGAGACCGCAGAGGCACAGGAGCTGGCATCTGGCATCGGGGATGCTGCAGAGGCCCGGC
GGTGGCTCAGGACCAAGCTGCAGGCGGTGGGAGAAAAAGCTGGCTTCCCTGGGGTGTTAGACACTGCAAAACC
AGGGAAGCTCCACACCATCCCCATCCCTGTCGCCAGGTGCTACACCTACAGCTGGAGCCAGGACAGCTTTGAC
ATCCTGCAGGAAATCCTGCTCAAGGAACAGGAGCTACTCCAGCCAGGGATCCTGGGAGATGATGAAGAGGAGG
AAGAGGAGGAGGAGGAGGTGGAGGAGGACTTGGAAACTGACGGGCACTGTGCCGAGAGAGATTCCCTGCTCTC
CACCAGCTCTTTGGCGTCCCATGACTCCACCTTGTCCCTTGCATCCTCCCAGGCCTCGGGGCCGGCCCTCTCG
CGCCATCTGCTGACTTCCTTTGTCTCAGGCCTCTCTGATGGCATGGACAGCGGCTACGTGGAGGACAGCGAGG
AGAGCTCCTCCGAGTGGCCTTGGAGGCGTGGCAGCCAGGAACGCCGAGGCCACCGCAGGCCTGGGCAGAAGTT
CATCAGGATCTATAAACTCTTCAAGAGCACCAGCCAGCTGGTACTGCGGAGGGACTCTCGGAGCCTGGAGGGC
AGCTCGGACACGGCCCTGCCCCTGAGGCGGGCAGGGAGCCTCTGCAGCCCCCTGGACGAACCAGTATCACCCC
CTTCCCGGGCCCAGCGCTCCCGCTCCCTGCCCCAGCCCAAACTCGGTACCCAGCTGCCCAGCTGGCTTCTGGC
CCCTGCTTCACGCCCCCAGCGCCGCCGCCCCTTCCTGAGTGGAGATGAGGATCCCAAGGCTTCCACGCTACGT
GTTGTGGTCTTTGGCTCCGATCGGATTTCAGGGAAGGTGGCTCGGGCGTACAGCAACCTTCGGCGGCTGGAGA
ACAATCGCCCACTCCTCACACGGTTCTTCAAACTTCAGTTCTTCTACGTGCCTGTGAAGCGAAGTCATGGGAC
CAGCCCTGGTGCCTGTCCACCCCCTCGGAGCCAGACGCCCTCACCCCCGACAGACTCCCCTAGGCACGCCAGC
CCTGGAGAGCTGGGCACCACCCCATGGGAGGAGAGCACCAATGACATCTCCCACTACCTCGGCATGCTGGACC
CCTGGTATGAGCGCAATGTACTGGGCCTCATGCACCTGCCCCCTGAAGTCCTGTGCCAGCAGTCCCTGAAGGC
TGAAGCCCAGGCCCTGGAGGGCTCCCCAACCCAGCTGCCCATCCTGGCTGACATGCTACTCTACTACTGCCGC
TTTGCCGCCAGACCGGTGCTGCTGCAAGTCTATCAGACCGAGCTGACCTTCATCACTGGGGAGAAGACGACAG
AGATCTTCATCCACTCCTTGGAGCTGGGTCACTCCGCTGCCACACGTGCCATCAAGGCGTCAGGTCCTGGCAG
CAAGCGGCTGGGCATCGATGGCGACCGGGAGGCTGTTCCTCTAACACTACAGATTATTTACAGCAAGGGGGCC
ATCAGTGGACGAAGTCGCTGGAGCAACCTGGAGAAGGTCTGTACCTCCGTGAACCTCAACAAGGCCTGCCGGA
AGCAGGAGGAGCTGGATTCCAGCATGGAGGCCCTGACGCTAAACCTGACAGAAGTGGTGAAAAGGCAGAACTC
CAAATCCAAGAAGGGCTTTAACCAGATTAGCACATCGCAGATCAAAGTGGACAAGGTGCAGATCATCGGCTCC
AACAGCTGCCCCTTTGCTGTGTGCCTGGACCAGGATGAGAGAAAGATCCTGCAGAGTGTAGTCAGATGTGAGG
TCTCACCGTGCTACAAGCCAGAGAAGAGCGACCTCTCCTCACCACCCCAGACGCCTCCTGACCTGCCGGCCCA
GGCCGCACCTGATCTCTGCTCCCTTCTCTGCCTGCCCATCATGACTTTCAGTGGAGCTCTGCCCTAGTGTGGG
CCCAGCGCCAGACTGGACAGAAGCCCTGGGGCAACCTCCTCGGCCACCCCTCCAGGACAGTCCCTCTCTGTGG
AGAACTGAATGGCCCTGTGCAGAGCCATAGTCCCACTGTGGGTCCTGCAATGAGCAGGGGCTGGGAGTAGAGG
GTTTCTGGGGCCTCAGGGTTCTGGGAAAGCAACAGCTATCAGAGAGAGAAGGGCCAGACCCCATAGCCTCTTA
GATTCCTGGCAGTAGAAGGAGAAGGATGGGTAAATTGACCTCTGAAGTCCCTGACCATTAGCATGGTCTAGGA
TCCTTTCTAGAAGGAAGATCTGAGGCTCTGGTGCTCAGGGGGATGGCTTGGGCCTTTTCTCTCAACCTTGGCT
GAGCCTACCCCTTACTTTGCCAAAGACTTGAGGACCCTGTATGTCTGGAGTTCAGTCCCCTCCTCTGTGGGGC
TCAGGTGATTGAAATGTGGATGAAACATTTCTCTACTTCAAGACCACCTCTCCCTGCAAACACCACACACACA
TGGCATGCATGTACGCACATGCGCACACACACACGCACACACCTCAATAATTTCTCTCAAGTTTCCTGAGTCT
CCAGAAAAACAGCACTAACGCTGGACCTGTCTACTCTCAGAACCCGGCACAGATTCTCTCTTGATCTCCTTTT
GGAATCTGAGATTCTTAGAAGACAGGATAGGGTTAAATTTAGTAGCAGCTCAGTTCTAGCTAAATCACTAGAG
GAAGTTAATTAACTTTAAGCCTTCATTTCTCCAGCACTAAAATGGAGTGGAGAGTTGGGGTGGAAATAAGACA
TCCTTAAAAGGTTAAATTGTCTGCAAAGCACCTAGCCCAGTGCCGAGCTCCCAGTAGGTGTTCAGTAAAGCTT
AGTGCCTGACTTTCTGAACACTGATTCCTCCTGTTTGGAGTCACTGGGATACTCTCATTGCCGTTGGGATGTT
CCTCACTCCTTCCCAGTTCGTGGCTGAGGCAGAACCCAGACTGAAGAGGGAAGAGACATTCCAGAGGAGGATT
GCCTTCGTCAGGGTAAGGGGTGGGCTGCTCAGGGGCCCTACCCTTCACCCCCTTCTGTATCAGATTGGCCCTC
CCACTCCCATCTCACTCTGCGTGTACAATCTTCCATATCCGCAAGTTCACTGGCACTCTTCTGGCACCTGGGC
AAGATCCCAGAACAGAGGATGGAGTGACTGGCCTCACAGAGCTTAGTGCCCGACTCAGGGGAAATGGGACTGG
TGCATGGGAAATGGTCAGCCTAGGATAGGACACGAGAGTCTGAAATTCAAAGCAACCAGCTTGAAGTGGTTTG
AGAAGCTGGAAGCAAACATGGGCTAGAGAGATAGGGCAGAAGTCAAGACGAGGATCTGGACTGATGTGGAGAA
AGTAGCCACGGAAGCATGAACTGTATCCTGCACAAAGTCCCTCTTCCCCGCCTCCTAATTCATTATGCCCAAA
AGGCCTTACGTGAAATTCCAGCCCAGAGTACTCATGACTTGAGAGACGTGGACAGAGCCAGCTTCTACCTTGC
CTGGCCGTCTCTCCCCTGTCTTAATGTCTGCTCTTGCTCTAAGCTCCAGAAGAGTGGCGGGCCATGTATCTTC
AATATGTTTTTGCTGTATGGGCAGGTTGTCTTATTATGTGATCAACAGATGTCCAGGAACTAATGAGTGGAAT
TTAATATTATTGTCAAATAAAACTTGATTTGTCCTATA
  (SEQ ID NO: 181)
MQPGATTCTEDRIQHALERCLHGLSLSRRSTSWSAGLCLNCWSLQELVSRDPGHFLILLEQILQKTREVQEKG
TYDLLTPLALLFYSTVLCTPHFPPDSDLLLKAASTYHRFLTWPVPYCSICQELLTFIDAELKAPGISYQRLVR
AEQGLPIRSHRSSTVTVLLLNPVEVQAEFLAVANKLSTPGHSPHSAYTTLLLHAFQATFGAHCDVPGLHCRLQ
AKTLAELEDIFTETAEAQELASGIGDAAEARRWLRTKLQAVGEKAGFPGVLDTAKPGKLHTIPIPVARCYTYS
WSQDSFDILQEILLKEQELLQPGILGDDEEEEEEEEEVEEDLETDGHCAERDSLLSTSSLASHDSTLSLASSQ
ASGPALSRHLLTSFVSGLSDGMDSGYVEDSEESSSEWPWRRGSQERRGHRRPGQKFIRIYKLFKSTSQLVLRR
DSRSLEGSSDTALPLRRAGSLCSPLDEPVSPPSRAQRSRSLPQPKLGTQLPSWLLAPASRPQRRRPFLSGDED
PKASTLRVVVEGSDRISGKVARAYSNLRRLENNRPLLTRFFKLQFFYVPVKRSHGTSPGACPPPRSQTPSPPT
DSPRHASPGELGTTPWEESTNDISHYLGMLDPWYERNVLGLMHLPPEVLCQQSLKAEAQALEGSPTQLPILAD
MLLYYCRFAARPVLLQVYQTELTFITGEKTTEIFIHSLELGHSAATRAIKASGPGSKRLGIDGDREAVPLTLQ
IIYSKGAISGRSRWSNLEKVCTSVNLNKACRKQEELDSSMEALTLNLTEVVKRQNSKSKKGFNQISTSQIKVD
KVQIIGSNSCPFAVCLDQDERKILQSVVRCEVSPCYKPEKSDLSSPPQTPPDLPAQAAPDLCSLLCLPIMTES
GALP*
```

[0151] An amino acid sequence for the protein encoded by the PTEN gene that is a regulator of T cell exhaustion/dysfunction resistance is available from the UniPROT database at accession no. P60484, cDNA NM_000314, with gene location at Chr 10: 87862638-87971930.

```
  (SEQ ID NO: 182)
GTTCTCTCCTCTCGGAAGCTGCAGCCATGATGGAAGTTTGAGAGTTGAGCCGCTGTGAGGCGAGGCCGGGCTC
AGGCGAGGGAGATGAGAGACGGCGGCGGCCGCGGCCCGGAGCCCCTCTCAGCGCCTGTGAGCAGCCGCGGGGG
CAGCGCCCTCGGGGAGCCGGCCGGCCTGCGGCGGCGGCAGCGGCGGCGTTTCTCGCCTCCTCTTCGTCTTTTC
TAACCGTGCAGCCTCTTCCTCGGCTTCTCCTGAAAGGGAAGGTGGAAGCCGTGGGCTCGGGCGGGAGCCGGCT
GAGGCGCGGCGGCGGCGGCGGCACCTCCCGCTCCTGGAGCGGGGGGGAGAAGCGGCGGCGGCGGCGGCCGCGG
CGGCTGCAGCTCCAGGGAGGGGGTCTGAGTCGCCTGTCACCATTTCCAGGGCTGGGAACGCCGGAGAGTTGGT
CTCTCCCCTTCTACTGCCTCCAACACGGCGGCGGCGGCGGCTGGCACATCCAGGGACCCGGGCCGGTTTTAAA
CCTCCCGTGCGCCGCCGCCGCACCCCCCGTGGCCCGGGCTCCGGAGGCCGCCGGCGGAGGCAGCCGTTCGGAG
GATTATTCGTCTTCTCCCCATTCCGCTGCCGCCGCTGCCAGGCCTCTGGCTGCTGAGGAGAAGCAGGCCCAGT
CGCTGCAACCATCCAGCAGCCGCCGCAGCAGCCATTACCCGGCTGCGGTCCAGAGCCAAGCGGCGGCAGAGCG
AGGGGCATCAGCTACCGCCAAGTCCAGAGCCATTTCCATCCTGCAGAAGAAGCCCCGCCACCAGCAGCTTCTG
CCATCTCTCTCCTCCTTTTTCTTCAGCCACAGGCTCCCAGACATGACAGCCATCATCAAAGAGATCGTTAGCA
GAAACAAAAGGAGATATCAAGAGGATGGATTCGACTTAGACTTGACCTATATTTATCCAAACATTATTGCTAT
GGGATTTCCTGCAGAAAGACTTGAAGGCGTATACAGGAACAATATTGATGATGTAGTAAGGTTTTTGGATTCA
AAGCATAAAAACCATTACAAGATATACAATCTTTGTGCTGAAAGACATTATGACACCGCCAAATTTAATTGCA
GAGTTGCACAATATCCTTTTGAAGACCATAACCCACCACAGCTAGAACTTATCAAACCCTTTTGTGAAGATCT
TGACCAATGGCTAAGTGAAGATGACAATCATGTTGCAGCAATTCACTGTAAAGCTGGAAAGGGACGAACTGGT
GTAATGATATGTGCATATTTATTACATCGGGGCAAATTTTTAAAGGCACAAGAGGCCCTAGATTTCTATGGGG
AAGTAAGGACCAGAGACAAAAAGGGAGTAACTATTCCCAGTCAGAGGCGCTATGTGTATTATTATAGCTACCT
GTTAAAGAATCATCTGGATTATAGACCAGTGGCACTGTTGTTTCACAAGATGATGTTTGAAACTATTCCAATG
TTCAGTGGCGGAACTTGCAATCCTCAGTTTGTGGTCTGCCAGCTAAAGGTGAAGATATATTCCTCCAATTCAG
GACCCACACGACGGGAAGACAAGTTCATGTACTTTGAGTTCCCTCAGCCGTTACCTGTGTGTGGTGATATCAA
AGTAGAGTTCTTCCACAAACAGAACAAGATGCTAAAAAAGGACAAAATGTTTCACTTTTGGGTAAATACATTC
TTCATACCAGGACCAGAGGAAACCTCAGAAAAAGTAGAAAATGGAAGTCTATGTGATCAAGAAATCGATAGCA
TTTGCAGTATAGAGCGTGCAGATAATGACAAGGAATATCTAGTACTTACTTTAACAAAAAATGATCTTGACAA
AGCAAATAAAGACAAAGCCAACCGATACTTTTCTCCAAATTTTAAGGTGAAGCTGTACTTCACAAAAACAGTA
GAGGAGCCGTCAAATCCAGAGGCTAGCAGTTCAACTTCTGTAACACCAGATGTTAGTGACAATGAACCTGATC
ATTATAGATATTCTGACACCACTGACTCTGATCCAGAGAATGAACCTTTTGATGAAGATCAGCATACACAAAT
TACAAAAGTCTGAATTTTTTTTTATCAAGAGGGATAAAACACCATGAAAATAAACTTGAATAAACTGAAAATG
GACCTTTTTTTTTTTAATGGCAATAGGACATTGTGTCAGATTACCAGTTATAGGAACAATTCTCTTTTCCTGA
CCAATCTTGTTTTACCCTATACATCCACAGGGTTTTGACACTTGTTGTCCAGTTGAAAAAAGGTTGTGTAGCT
GTGTCATGTATATACCTTTTTGTGTCAAAAGGACATTTAAAATTCAATTAGGATTAATAAAGATGGCACTTTC
CCGTTTTATTCCAGTTTTATAAAAAGTGGAGACAGACTGATGTGTATACGTAGGAATTTTTTCCTTTTGTGTT
CTGTCACCAACTGAAGTGGCTAAAGAGCTTTGTGATATACTGGTTCACATCCTACCCCTTTGCACTTGTGGCA
ACAGATAAGTTTGCAGTTGGCTAAGAGAGGTTTCCGAAGGGTTTTGCTACATTCTAATGCATGTATTCGGGTT
AGGGGAATGGAGGGAATGCTCAGAAAGGAAATAATTTTATGCTGGACTCTGGACCATATACCATCTCCAGCTA
TTTACACACACCTTTCTTTAGCATGCTACAGTTATTAATCTGGACATTCGAGGAATTGGCCGCTGTCACTGCT
TGTTGTTTGCGCATTTTTTTTTAAAGCATATTGGTGCTAGAAAAGGCAGCTAAAGGAAGTGAATCTGTATTGG
GGTACAGGAATGAACCTTCTGCAACATCTTAAGATCCACAAATGAAGGGATATAAAAATAATGTCATAGGTAA
GAAACACAGCAACAATGACTTAACCATATAAATGTGGAGGCTATCAACAAAGAATGGGCTTGAAACATTATAA
AAATTGACAATGATTTATTAAATATGTTTTCTCAATTGTAACGACTTCTCCATCTCCTGTGTAATCAAGGCCA
GTGCTAAAATTCAGATGCTGTTAGTACCTACATCAGTCAACAACTTACACTTATTTTACTAGTTTTCAATCAT
AATACCTGCTGTGGATGCTTCATGTGCTGCCTGCAAGCTTCTTTTTTCTCATTAAATATAAAATATTTTGTAA
TGCTGCACAGAAATTTTCAATTTGAGATTCTACAGTAAGCGTTTTTTTTCTTTGAAGATTTATGATGCACTTA
TTCAATAGCTGTCAGCCGTTCCACCCTTTTGACCTTACACATTCTATTACAATGAATTTTGCAGTTTTGCACA
TTTTTTAAATGTCATTAACTGTTAGGGAATTTTACTTGAATACTGAATACATATAATGTTTATATTAAAAAGG
ACATTTGTGTTAAAAAGGAAATTAGAGTTGCAGTAAACTTTCAATGCTGCACACAAAAAAAAGACATTTGATT
TTTCAGTAGAAATTGTCCTACATGTGCTTTATTGATTTGCTATTGAAAGAATAGGGTTTTTTTTTTTTTTTTT
TTTTTTTTTTTTAAATGTGCAGTGTTGAATCATTTCTTCATAGTGCTCCCCCGAGTTGGGACTAGGGCTTCAA
TTTCACTTCTTAAAAAAAATCATCATATATTTGATATGCCCAGACTGCATACGATTTTAAGCGGAGTACAACT
ACTATTGTAAAGCTAATGTGAAGATATTATTAAAAAGGTTTTTTTTTCCAGAAATTTGGTGTCTTCAAATTAT
ACCTTCACCTTGACATTTGAATATCCAGCCATTTTGTTTCTTAATGGTATAAAATTCCATTTTCAATAACTTA
TTGGTGCTGAAATTGTTCACTAGCTGTGGTCTGACCTAGTTAATTTACAAATACAGATTGAATAGGACCTACT
AGAGCAGCATTTATAGAGTTTGATGGCAAATAGATTAGGCAGAACTTCATCTAAAATATTCTTAGTAAATAAT
GTTGACACGTTTTCCATACCTTGTCAGTTTCATTCAACAATTTTTAAATTTTTAACAAAGCTCTTAGGATTTA
CACATTTATATTTAAACATTGATATATAGAGTATTGATTGATTGCTCATAAGTTAAATTGGTAAAGTTAGAGA
CAACTATTCTAACACCTCACCATTGAAATTTATATGCCACCTTGTCTTTCATAAAAGCTGAAAATTGTTACCT
AAAATGAAAATCAACTTCATGTTTTGAAGATAGTTATAAATATTGTTCTTTGTTACAATTTCGGGCACCGCAT
ATTAAAACGTAACTTTATTGTTCCAATATGTAACATGGAGGGCCAGGTCATAAATAATGACATTATAATGGGC
TTTTGCACTGTTATTATTTTTCCTTTGGAATGTGAAGGTCTGAATGAGGGTTTTGATTTTGAATGTTTCAATG
TTTTTGAGAAGCCTTGCTTACATTTTATGGTGTAGTCATTGGAAATGGAAAAATGGCATTATATATATTATAT
ATATAAATATATATTATACATACTCTCCTTACTTTATTTCAGTTACCATCCCCATAGAATTTGACAAGAATTG
CTATGACTGAAAGGTTTTCGAGTCCTAATTAAAACTTTATTTATGGCAGTATTCATAATTAGCCTGAAATGCA
TTCTGTAGGTAATCTCTGAGTTTCTGGAATATTTTCTTAGACTTTTTGGATGTGCAGCAGCTTACATGTCTGA
AGTTACTTGAAGGCATCACTTTTAAGAAAGCTTACAGTTGGGCCCTGTACCATCCCAAGTCCTTTGTAGCTCC
TCTTGAACATGTTTGCCATACTTTTAAAAGGGTAGTTGAATAAATAGCATCACCATTCTTTGCTGTGGCACAG
GTTATAAACTTAAGTGGAGTTTACCGGCAGCATCAAATGTTTCAGCTTTAAAAAATAAAAGTAGGGTACAAGT
TTAATGTTTAGTTCTAGAAATTTTGTGCAATATGTTCATAACGATGGCTGTGGTTGCCACAAAGTGCCTCGTT
TACCTTTAAATACTGTTAATGTGTCATGCATGCAGATGGAAGGGGTGGAACTGTGCACTAAAGTGGGGGCTTT
AACTGTAGTATTTGGCAGAGTTGCCTTCTACCTGCCAGTTCAAAAGTTCAACCTGTTTTCATATAGAATATAT
ATACTAAAAAATTTCAGTCTGTTAAACAGCCTTACTCTGATTCAGCCTCTTCAGATACTCTTGTGCTGTGCAG
CAGTGGCTCTGTGTGTAAATGCTATGCACTGAGGATACACAAAAATACCAATATGATGTGTACAGGATAATGC
CTCATCCCAATCAGATGTCCATTTGTTATTGTGTTTGTTAACAACCCTTTATCTCTTAGTGTTATAAACTCCA
CTTAAAACTGATTAAAGTCTCATTCTTGTCATTGTGTGGGTGTTTTATTAAATGAGAGTTTATAATTCAAATT
GCTTAAGTCCATTGAAGTTTTAATTAATGGGCAGCCAAATGTGAATACAAAGTTTTCAGTTTTTTTTTTTCCT
GCTGTCCTTCAAAGCCTACTGTTTAAAAAAAAAAAAAAAAAAAAACATGGCCTGAGAGTAGAGTATCTGTCTA
CTCATGTTTAATTAAGGAAAAACACTTATTTTTAGGGCTTTAGTCATCACTTCATAAATTGTATAAGCACATT
AAATAGCGTTCTAGTCCTGAAAAAGTCCAAGATTCTTAGAAAATTGTGCATATTTTTATTATGACAGATGTTT
GAAGATAATTCCCCAGAATGGATTTGATACTTTAGATTTCAATTTTGTGGCTTTTGTCTATTATTCTGTACTC
TGCCATCAGCATATGGAAAGCTTCATTTACTCATCATGACTTGTGCCATATAAAAATTGATATTTCGGAATAG
TCTAAAGGACTTTTTGTACTTGAATTTAATCATGTTGTTTCTAATATTCTTAAAAGCTTGAAGACTAAAGCAT
ATCCTTTCAACAAAGCATAGTAAGGTAATAAGAAAGTGTAGTTTGTACAAGTGTTAAAAAAATAAAGTAGACA
ATGTTACAGTGGGACTTATTATTTCAAGTTTACATTTTCTCCATGTAATTTTTTAAAAAGTAAATGAAAAAAT
GTGCAATAATGTAAAATATGAAGTGTATGTGTACACACATTTTATTTTTCGGTATCTTGGGTATACGTATGGT
TGAAAACTATACTGGAGTCTAAAAGTATTCTAATTTATAAGAAGACATTTTGGTGATGTTTGAAAAATAGAAA
TGTGCTAGTTTTGTTTTTATATCATGTCCTTTGTACGTTGTAATATGAGCTGGCTTGGTTCAGTAAATGCCAT
CACCATTTCCATTGAGAATTTAAAACTCACCAGTGTTTAATATGCAGGCTTCCAAAGGCTTATGAAAAAAATC
AAGACCCTTAAATCTAGTTAATTTGCTGCTAACATGAAACTCTTTGGTTCTTTTATTTTTGCCAGATAATTAG
ACACACATCTAAAGCTTAGTCTTAAATGGCTTAAGTGTAGCTATTGATTAGTGCTGTTGCTAGTTCAGAAAGA
AATGTTTGTGAATGGAAACAAGAATATTCAGTCCAAACTGTTGTAAGGACAGTACCTGAAAACCAGGAAACAG
GATAATGGAAAAAGTCTTTTAAAGATGAAATGTTGGAGCCAACTTTCTTATAGAATTAATTGTATGTGGCTAT
AGAAAGCCTAATGATTGTTGCTTATTTTTGAGAGCATATTATTCTTTTATGACCATAATCTTGCTGTTTTTCC
ATCTTCCAAAAGATCTTCCTTCTAATATGTATATCAGAATGTGGGTAGCCAGTCAGACAAATTCATATTGGTT
GGTAGCTTTAAAAAGTTTGTAATGTGAAGACAGGAAAGGACAAAATAGTTTGCTTTGGTGGTAGTACTCTGGT
TGTTAAGCTAGGTATTTTGAGACTACTTCCCCATCACAACAACAATAAAATAATCACTCATAATCCTATCACC
TGGAGACATAGCCATCGTTAATATGTTAGTGACTATACAATCATGTTTTCTTCTGTATATCCATGTATATTCT
TTAAAAATGAAATTTATACTGTACCTGATCTCAAAGCTTTTTAGCTTAGTATATCTGTCATGAATTTGTAGGA
TGTTCCATTGCATCAGAAAACGGACAGTGATTTGATTACTTTCTAATGCCACAGATGCAGATTACATGTAGTT
ATTGAGAATCCTTTCGAATTCAGTGGCTTAATCATGAATGTCTAAATATTGTTGACATTAGGATGATACATGT
AAATTAAAGTTACATTTGTTTAGCATAGACAAGCTTAACATTGTAGATGTTTCTCTTCAAAAATCATCTTAAA
CATTTGCATTTGGAATTGTGTTAAATAGAATGTGTGAAACACTGTATTAGTAAACTTCATCACCTTTCTACTT
CCTTATAGTTTGAACTTTTCAGTTTTTGTAGTTCCCAAACAGTTGCTCAATTTAGAGCAAATTAATTTAACAC
CTGCCAAAAAAAGGCTGCTGTTGGCTTATCAGTTGTCTTTAAATTCAAATGCTCATGTGACTTTTATCACATC
AAAAAATATTTCATTAATGATTCACCTTTAGCTCTGAAAATTACCGCGTTTAGTAATTATAGTGGGCTTATAA
AAACATGCAACTCTTTTTGATAGTTATTTGAGAATTTTGGTGAAAAATATTTAGCTGAGGGCAGTATAGAACT
TATAAACCAATATATTGATATTTTTAAAACATTTTTACATATAAGTAAACTGCCATCTTTGAGCATAACTACA
TTTAAAAATAAAGCTGCATATTTTTAAATCAAGTGTTTAACAAGAATTTATATTTTTTATTTTTTAAAATTAA
AAATAATTTATATTTCCTCTGTTGCATGAGGATTCTCATCTGTGCTTATAATGGTTAGAGATTTTATTTGTGT
GGAATGAAGTGAGGCTTGTAGTCATGGTTCTAGTGTTTCAGTTTGCCAAGTCTGTTTACTGCAGTGAAATTCA
TCAAATGTTTCAGTGTGGTTTTCTGTAGCCTATCATTTACTGGCTATTTTTTTATGTACACCTTTAGGATTTT
CTGCCTACTCTATCCAGTTGTCCAAATGATATCCTACATTTTACAAATGCCCTTTCAGTTTCTATTTTCTTTT
TCCATTAAATTGCCCTCATGTCCTAATGTGCAGTTTGTAAGTGTGTGTGTGTGTGTCTGTGTGTGTGTGAATT
TGATTTTCAAGAGTGCTAGACTTCCAATTTGAGAGATTAAATAATTTAATTCAGGCAAACATTTTTCATTGGA
ATTTCACAGTTCATTGTAATGAAAATGTTAATCCTGGATGACCTTTGACATACAGTAATGAATCTTGGATATT
AATGAATTTGTTAGTAGCATCTTGATGTGTGTTTTAATGAGTTATTTTCAAAGTTGTGCATTAAACCAAAGTT
GGCATACTGGAAGTGTTTATATCAAGTTCCATTTGGCTACTGATGGACAAAAAATAGAAATGCCTTCCTATGG
AGAGTATTTTTCCTTTAAAAAATTAAAAAGGTTAATTATTTTGACTA
  (SEQ ID NO: 183)
MTAIIKEIVSRNKRRYQEDGEDLDLTYIYPNIIAMGFPAERLEGVYRNNIDDVVRFLDSKHKNHYKIYNLCAE
RHYDTAKFNCRVAQYPFEDHNPPQLELIKPFCEDLDQWLSEDDNHVAAIHCKAGKGRTGVMICAYLLHRGKEL
KAQEALDFYGEVRTRDKKGVTIPSQRRYVYYYSYLLKNHLDYRPVALLFHKMMFETIPMFSGGTCNPQFVVCQ
LKVKIYSSNSGPTRREDKFMYFEFPQPLPVCGDIKVEFFHKQNKMLKKDKMFHFWVNTFFIPGPEETSEKVEN
GSLCDQEIDSICSIERADNDKEYLVLTLTKNDLDKANKDKANRYFSPNFKVKLYFTKTVEEPSNPEASSSTSV
TPDVSDNEPDHYRYSDTTDSDPENEPFDEDQHTQITKV*
```

[0152] An amino acid sequence for the protein encoded by the RASA2 gene that is a regulator of T cell exhaustion/dysfunction resistance is available from the UniPROT database at accession no. Q15283, cDNA NM_001303245, with gene location at Chr 3: 141487027-141615344.

(SEQ ID NO: 184)
GCTCCGCCTCGCCCGGCTACGCAGGCGGCAGGGCTGCGGCACGGGCCGGGCGGCACCATGGCGGCGGCGGCGC
CTGCTGCTGCGGCGGCTTCTTCCGAGGCGCCAGCGGCGAGTGCGACTGCAGAGCCCGAGGCCGGGGACCAGGA
CAGTCGCGAGGTTCGAGTGTTGCAGAGCCTGCGGGGCAAGATCTGTGAAGCAAAAAATTTATTGCCATATCTT
GGACCCCACAAAATGAGAGATTGTTTCTGTACCATAAATTTGGACCAGGAAGAAGTTTATCGTACCCAAGTTG
TGGAAAAATCTTTAAGCCCATTTTTCAGTGAAGAATTTTACTTTGAGATTCCAAGAACTTTCCAGTATTTGTC
TTTCTATGTTTATGATAAGAATGTTTTACAAAGAGATCTCCGTATAGGAAAAGTAGCCATCAAAAAAGAAGAC
TTGTGTAATCACAGTGGCAAAGAAACTTGGTTTTCATTACAGCCTGTTGACTCCAATTCAGAGGTTCAGGGTA
AAGTTCACCTTGAATTAAAACTGAATGAACTGATAACGGAGAATGGAACTGTATGCCAGCAGCTTGTTGTACA
CATCAAGGCATGCCATGGGTTGCCTCTCATAAATGGCCAAAGCTGTGACCCTTATGCAACAGTTTCTCTAGTG
GGCCCTTCTAGGAATGACCAAAAGAAGACAAAAGTAAAGAAGAAAACAAGCAATCCGCAGTTTAATGAAATCT
TTTATTTTGAGGTAACCAGATCCAGTAGTTACACCAGAAAGTCCCAGTTCCAGGTAGAAGAGGAGGACATTGA
AAAGCTAGAAATCAGGATCGACTTGTGGAACAATGGAAACCTAGTCCAAGATGTTTTCCTAGGTGAGATTAAG
GTTCCTGTGAACGTATTAAGAACTGATTCCTCTCATCAAGCCTGGTACTTGCTACAGCCAAGAGACAATGGAA
ACAAGTCATCCAAAACTGATGACCTGGGGTCTCTTCGATTAAATATATGTTATACAGAAGACTACGTGCTTCC
TTCAGAGTACTATGGTCCTTTGAAAACTTTGCTGCTAAAATCACCAGATGTTCAACCAATATCTGCCTCAGCT
GCTTACATTTTGAGTGAAATATGTCGAGATAAAAATGATGCTGTTTTGCCCCTTGTACGACTGCTGCTGCACC
ATGATAAACTTGTTCCTTTTGCCACTGCTGTGGCTGAATTAGACTTGAAGGATACACAAGATGCAAACACAAT
TTTTAGAGGAAATTCCCTGGCTACCCGATGTCTGGATGAGATGATGAAAATAGTGGGAGGGCACTACCTGAAA
GTAACATTAAAACCTATTCTTGATGAGATATGTGACTCCTCAAAATCCTGTGAAATCGATCCTATTAAATTGA
AAGAGGGAGATAATGTAGAAAATAATAAGGAGAATCTGCGCTACTATGTAGACAAGTTATTCAATACAATTGT
AAAATCAAGTATGAGCTGCCCCACTGTAATGTGTGATATCTTTTATTCTCTAAGGCAGATGGCTACTCAGAGA
TTTCCTAATGACCCTCATGTTCAGTATTCTGCAGTGAGCAGCTTTGTATTTCTTCGTTTCTTTGCTGTAGCCG
TAGTATCACCTCATACTTTTCATTTGCGACCTCATCATCCAGATGCACAGACAATTAGAACATTAACTCTCAT
CTCAAAAACTATACAAACTTTGGGAAGCTGGGGGAGTCTGTCCAAAAGCAAGTCAAGTTTCAAAGAGACATTC
ATGTGTGAATTTTTCAAAATGTTTCAAGAAGAAGGATATATTATAGCAGTTAAAAAGTTCTTGGATGAAATTT
CATCTACTGAAACTAAAGAGTCCAGTGGTACGAGTGAGCCTGTGCACCTGAAAGAAGGTGAGATGTATAAAAG
AGCTCAAGGAAGAACTCGGATTGGAAAAAAGAATTTTAAGAAACGATGGTTCTGCTTAACAAGCAGAGAGCTC
ACCTACCACAAACAGCCAGGCAAAGATGCAATCTACACAATCCCAGTAAAAAACATTCTTGCTGTGGAAAAAC
TGGAAGAGAGCTCTTTCAACAAGAAAAATATGTTCCAAGTAATACATACGGAGAAACCACTCTATGTCCAGGC
AAATAACTGTGTAGAAGCTAATGAATGGATAGACGTACTCTGCAGGGTGAGCCGATGCAATCAAAACAGGCTC
AGTTTTTATCATCCCTCTGTGTATCTGAACGGAAATTGGCTCTGCTGTCAGGAGACTGGTGAAAACACTCTCG
GCTGCAAGCCATGTACTGCAGGTGTCCCTGCAGACATCCAAATAGATATTGATGAAGACAGAGAAACAGAAAG
AATTTATTCCCTTTTTACCCTCAGTTTACTTAAGCTGCAGAAGATGGAAGAGGCTTGTGGAACTATTGCAGTC
TATCAAGGACCACAGAAAGAGCCTGATGATTATTCTAACTTTGTAATCGAGGATTCTGTAACAACCTTTAAGA
CAATTCAGCAAATAAAAAGCATAATTGAGAAGCTGGATGAACCTCATGAAAAATATAGGAAGAAAAGATCCAG
TAGTGCAAAATATGGGAGCAAGGAAAATCCAATTGTTGGGAAAGCATCTTAGAGTTTAACAGATTGGTTCAGA
AGAACTGGAAAATATTATTTTTCTTGGAGCTTTTCAATTCATCATGTATTTTGTTCATGGTATTTAAGAATGA
GCATCCGCTTCAATGTCATCTGCCTCCACATTGTATTTAATATTTAATAATTGAAATTAATTGTTTGGGAATC
CTGGTATTGATGTATTACTAGAGAATTTAAAGCCCAAGATTCCCTTCATACCTGTGTGACCAAATCCATGTTT
CTGCAACTTCTTTTTAATCGAAAGAATCTTCCTAGAAAAGCTTTGTAACAAAGGGAGAACTCCTCCGTAGCAA
GAAACCATCTCTTCTTGTAACACTCTGTTCTGTGGACTTGTTTTCACTACCATCAGTGCCTGCTCTATACTGC
CAACATTGTGTTTTACTAGAAAATTCCAATTCATGACAGTTCAGAGCTTTTCATTTAGTTCATGTAGACCCTC
CCACTTTAAAAAAGAAAAAAAATAAGAAGTGTTTTTCCTTTGGTCCATCAGTCATTACAGGTTCCATTCAAGA
CAGTGATAGAAACTTTAGAAAACTGCCAGAGCATACTTGAAAGTTGGTAGATCCTTTTGCCTAAAGATGTAAA
CAAAACTCAAGACAGAAGGAATCAGGGAATATGTGCTATTGTGTGCATCTTGTTTACATTTGGGATCAGTGAT
GGCAAAAGAAGTAATGAGACCACTGAAATTGTTTTCATTGTTTTAAATACCAGGTACTCATTTTCTTGATTTG
AAAGTTTAACATGACTTCTAAGGACATCTCTTCAAAAAGAAAGTAAACAGGGAATGAAGGTGGTGGGAAAATC
ACTTCACTTCACCCACTATTTCATGTTGTAATAAGGGCCACCATAAGGATGCCCTCCTCATAGTGTTCGGTTC
TGATCTTCCTCGAGAACAGTCACTTGGCGCACTTTAATAATCTGGACTGCTCCAGATTTGACTTTAGATACTC
CATGGTATCTAGTCTTTATGATCAGTTGAATGATCAGTGTTTAAGTCTAAAAATAATGCTTTCCTGAAAATGT
TTATATTTCATTGCTGTTTCCTTATTGCCTGCTAGCCAAATGGAATTTGGGCAAGCAACTCTTTGAAGACTTT
TTTACCCTAGAAATTTACTTTTGTCCTAAAAACCCTAACTGTAAATAAGCAGTCGAAGCAAGTTGCCACCTTG
AAGTTGAGGGATACACTTTGCTTCATCAGTATTAAAAACCATGGTACTCTTATTTTGTCTTTTTTAATTCAAA
ACATTTTCTAAATGTGGTACTTTGAACCTTGGAGTATTTACATGTTTCTGTTCAAAACTGTGACTTATTAATG
TAAGTCTGCTAGTAGTACTTTTTTTGTCTGAGCATAAGCTATATTTCAAGATATACTTTGCCAATTTTGTTAT
TGGTGGGTAATCATTTTTAAATTATATTGTTATTAGGTAATTATTTTTAAAGACTACTGGCATACAATCAAAG
TTGTTCCATAAAAGAATATAACTGAGCAATGTATTTCTCTAAATGACTTGTAAAAATCAATGAATTATGTTTA
AGTCTGCATTATGGTAGGTTATTACTCCCAGCTCATTTTAAAGACAAGTTTGAAAGAGTCCTTTAAATTTTAT
AAGCTTGTAGATTCCATAAACTACACTGATTTATACATTTGAAAGAATTTAGCCATTTAATAAATTTCTTATT
CTCAAATTGCATTTAGATTAAAATTCCTTTTAAGAGTGTCTGAAATGTCTGCCTGCGAAGAACATGTAAACAT
TGCCAGATACCAGTCATTATTCTTTAGTGGCTTTTTAGTCCTCTGCTTTTTTTTTTAAGGCAAAAGAAATATG
CATCTAGCATTTCTAATACCAAATCCCCAATTGTGATTGTTTTAAAGATCATGGTATGATCACAGGGACCAAG
GCTGTGTGCATATATAACTCTGGATTTGAAAGGAGGAGAGTTCAGCCATCTAGTTCTTTTCTTCACATGACAC
TTTTAAACAGCCAGTTTGACTGGAATTAACCAACTTGGCACAGCCTAAAAAAGGAGTAATGTGAAATTAAATT
ATTTTTCTTTGAAAGTCTTTTGAAATAAGAGACCATGTAAGTAGGACCCTAAGACAACCAAGGAATTTGCTTC
CAGGGCCCTCATTCCTCTGCTGTTACTTACAAATGTTTTAATTTTTACTACCTGATATTCTTTCTCTACCTTT
TCCACATTTGAAAATATACAAGGCAGCTCACTTCATCCTAAAAACCTAAAAACTCCAGGAAGGAAAGAAAAGG
ATGATATGGGGAAATTTGCCATAAATGCCGGTTCTGGTTCTTAGTTTAGCCATTTCCATCAGTTGAAATTGTG
GTGTGATCTGTTGCTTGTTTCGTTGTTGTTTTGTTTTTGTGTAGCTTTGTTTTTTAATATTCATTTAATAAGA
TGATGGGCAATAGCAAACATTTTTACTCCCAGGAATATAATTTATCAAATTGAACTATTTTATTTGCCAAAGA
AACTTGTTTTTAATATCACGGGTAATGGGTAAGTGTGAAAACTAGGCTTTTTTTTATGAAACAAAAAAAGGTG
ACGAATAATATGGCTTTTGTTTCTGTTTCTGAAGCCTGATTTCATTTATGCCAGGTTTTGAAAAACAGATCTT
TTTCTTAAGTGAAAGCACCTTTAATTTGCTCTAACGGTACATCCTGTAAAGACAGAATTCTGCATAGCCTTTT
AGGTGTTTTTACAGTATGTGAAAAATACAAGACTCATTCTAGAGTTAAATTACCAATCTTGGTTGATATTATC
TGCTTCCATTTTTATTAATTTGGAAATTAATATGTTGCTAGTAAATATTGGTTTTTACAGTACCCAGTTTGAA
AATGTAAGTTATCAAAACTTAATGTAGTGAATTTGTGTAACCATGTTGTATTGTTGAGAATGTATTTTTATTT
AAATTTTATTTTCTTATCAAGAGTATTATAAAAATTAACTTTTGTAACTGTCGCTTGGAAATAACTCAAATAA
ATTACAAGAAGCCTGTC
(SEQ ID NO: 185)
MAAAAPAAAAASSEAPAASATAEPEAGDQDSREVRVLQSLRGKICEAKNLLPYLGPHKMRDCFCTINLDQEEV
YRTQVVEKSLSPFFSEEFYFEIPRTFQYLSFYVYDKNVLQRDLRIGKVAIKKEDLCNHSGKETWFSLQPVDSN
SEVQGKVHLELKLNELITENGTVCQQLVVHIKACHGLPLINGQSCDPYATVSLVGPSRNDQKKTKVKKKTSNP
QFNEIFYFEVTRSSSYTRKSQFQVEEEDIEKLEIRIDLWNNGNLVQDVELGEIKVPVNVLRTDSSHQAWYLLQ
PRDNGNKSSKTDDLGSLRLNICYTEDYVLPSEYYGPLKTLLLKSPDVQPISASAAYILSEICRDKNDAVLPLV
RLLLHHDKLVPFATAVAELDLKDTQDANTIFRGNSLATRCLDEMMKIVGGHYLKVTLKPILDEICDSSKSCEI
DPIKLKEGDNVENNKENLRYYVDKLENTIVKSSMSCPTVMCDIFYSLRQMATQRFPNDPHVQYSAVSSFVELR
FFAVAVVSPHTFHLRPHHPDAQTIRTLTLISKTIQTLGSWGSLSKSKSSFKETFMCEFFKMFQEEGYIIAVKK
FLDEISSTETKESSGTSEPVHLKEGEMYKRAQGRTRIGKKNFKKRWFCLTSRELTYHKQPGKDAIYTIPVKNI
LAVEKLEESSFNKKNMFQVIHTEKPLYVQANNCVEANEWIDVLCRVSRCNQNRLSFYHPSVYLNGNWLCCQET
GENTLGCKPCTAGVPADIQIDIDEDRETERIYSLFTLSLLKLQKMEEACGTIAVYQGPQKEPDDYSNEVIEDS
VTTFKTIQQIKSIIEKLDEPHEKYRKKRSSSAKYGSKENPIVGKAS*

[0153] An amino acid sequence for the protein encoded by the RNASE9 gene that is a regulator of T cell exhaustion/dysfunction resistance is available from the UniPROT database at accession no. P60153, cDNA NM_001001673, with gene location at Chr 14: 20556093-20560931.

```
  (SEQ ID NO: 186)
GCTCTACCTCTTGGACTTCCAACTTCTGTGAGTCAACATAGTGCCTCTTGCATTTAAGTGTCTGCAGGAAAAA
TGATGAGAACTCTCATCACCACACACCCACTGCCCCTGCTTCTATTGCCGCAGCAGCTGCTGCAGCTGGTGCA
GTTTCAAGAGGTGGATACAGATTTTGATTTCCCAGAAGAAGATAAAAAAGAAGAATTTGAAGAGTGTTTGGAA
AAATTTTTTAGTACAGGGCCCGCCAGACCACCTACCAAAGAAAAAGTCAAAAGACGTGTCCTTATTGAACCTG
GAATGCCACTAAATCATATAGAGTACTGTAACCATGAAATCATGGGAAAAAATGTTTACTACAAACACCGTTG
GGTGGCAGAACATTACTTCCTTCTTATGCAATATGACGAGCTCCAAAAAATCTGTTACAACAGATTTGTGCCA
TGTAAGAATGGAATTAGGAAATGTAACAGGAGCAAAGGTCTTGTAGAAGGAGTGTATTGTAATTTAACAGAAG
CATTTGAAATACCAGCGTGTAAATACGAATCACTTTATAGGAAGGGCTACGTCCTTATCACTTGTTCATGGCA
AAATGAAATGCAAAAACGTATTCCTCATACTATAAATGATCTCGTGGAGCCACCTGAACACAGAAGTTTCCTC
AGTGAGGATGGTGTCTTTGTCATATCGCCCTAGCAGAGCGTTCTCTGAGAGCTTAGGGTGGGAGGAATATTTC
TCTCCATACTGATCCTTATAGATCAAAGTTGAGAATGGTAATTTTGCTTCCATTCACTTTAATCACCCACCTT
CCTTTCTTCCTTTCCCAACACCTCACAAAAGCACCTTAGGCTAGGTTCACAGACGGTGCTCTGAGATGTGGTC
TCATGCAGGTCCCCTAAGTTAGCATGCCTTGAATGTGTTACGGATACAGATGCCTGCAGTGGAAGGATGACCA
GCACCAAGAGGAAAAGGAAATGGTTGCCTGAAGTGTGCTCCAAAGACACATCCATGTGATTCTCTAGTTCAGC
AGAAAGAATAAAAATTGCTTCAATCTA
  (SEQ ID NO: 187)
MMRTLITTHPLPLLLLPQQLLQLVQFQEVDTDFDFPEEDKKEEFEECLEKFFSTGPARPPTKEKVKRRVLIEP
GMPLNHIEYCNHEIMGKNVYYKHRWVAEHYFLLMQYDELQKICYNRFVPCKNGIRKCNRSKGLVEGVYCNLTE
AFETPACKYESLYRKGYVLITCSWQNEMQKRIPHTINDLVEPPEHRSFLSEDGVFVISP*
```

[0154] An amino acid sequence for the protein encoded by the RNF7 gene that is a regulator of T cell exhaustion/dysfunction resistance is available from the UniPROT database at accession no. Q9UBF6, cDNA NM_001201370, with gene location at Chr 3: 141738249-141747560.

(SEQ ID NO: 188)
AGAGCCGCCCTAGCCTTCCGCCTTCCCCAAGCCAACGTCTCCGCCGTCGG
CTCCGCGGCGCCGCCATGGCCGACGTGGAAGACGGAGAGGAAACCTGCGC
CCTGGCCTCTCACTCCGGGAGCTCAGGCTCCAAGTCGGGAGGCGACAAGA
TGTTCTCCCTCAAGAAGTGGAACGCGGTGGCCATGTGGAGCTGGGACGTG
GAGTGCGATACGTGCGCCATCTGCAGGGTCCAGGTGATGGTGGTCTGGGG
AGAATGTAATCATTCCTTCCACAACTGCTGCATGTCCCTGTGGGTGAAAC
AGAACAATCGCTGCCCTCTCTGCCAGCAGGACTGGGTGGTCCAAAGAATC
GGCAAATGAGAGTGGTTAGAAGGCTTCTTAGCGCAGTTGTTCAGAGCCCT
GGTGGATCTTGTAATCCAGTGCCCTACAAAGGCTAGAACACTACAGGGGA
TGAATTCTTCAAATAGGAGCCGATGGATCTGTGGTCCTTTGGGACTCATC
AAAGCCTTGGTTTAGCATTTTGTCAGTTTTATCTTCAGAAATTCTCTGCG
ATTAAGAAGATAATTTATTAAAGGTGGTCCTTCCTACCTCTGTGGTGTGT
GTCGCGCACACAGCTTAGAAGTGCTATAAAAAAGGAAAGAGCTCCAAATT
GAATCACCTTTATAATTTACCCATTTCTATACAACAGGCAGTGGAAGCAG
TTTCAGAGAACTTTTTGCATGCTTATGGTTGATCAGTTAAAAAAGAATGT
TACAGTAACAAATAAAGTGCAGTTTAAAACCC
(SEQ ID NO: 189)
MADVEDGEETCALASHSGSSGSKSGGDKMFSLKKWNAVAMWSWDVECDTC
AICRVQVMVVWGECNHSFHNCCMSLWVKQNNRCPLCQQDWVVQRIGK*

[0155] An amino acid sequence for the protein encoded by the RPS6KA1 gene that is a regulator of T cell exhaustion/dysfunction resistance is available from the UniPROT database at accession no. Q15418, cDNA NM_001006665, with gene location at Chr 1: 26529761-26575030.

```
  (SEQ ID NO: 190)
CCCCGGACTCTGCCTGCTCCTGCCATGGTGCCGTGGCCCTGCTGGGCGGATGGAGCAGGATCCCAAGCCGCCC
CGTCTGCGGCTCTGGGCCCTGATCCCCTGGCTTCCCAGGAAGCAGCGGCCCAGGATCAGCCAGACCTCTCTGC
CTGTCCCTGGCCCTGGCTCTGGCCCCCAGCGGGACTCGGATGAGGGCGTCCTCAAGGAGATCTCCATCACGCA
CCACGTCAAGGCTGGCTCTGAGAAGGCTGATCCATCCCATTTCGAGCTCCTCAAGGTTCTGGGCCAGGGATCC
TTTGGCAAAGTCTTCCTGGTGCGGAAAGTCACCCGGCCTGACAGTGGGCACCTGTATGCTATGAAGGTGCTGA
AGAAGGCAACGCTGAAAGTACGTGACCGCGTCCGGACCAAGATGGAGAGAGACATCCTGGCTGATGTAAATCA
CCCATTCGTGGTGAAGCTGCACTATGCCTTCCAGACCGAGGGCAAGCTCTATCTCATTCTGGACTTCCTGCGT
GGTGGGGACCTCTTCACCCGGCTCTCAAAAGAGGTGATGTTCACGGAGGAGGATGTGAAGTTTTACCTGGCTG
AGCTGGCTCTGGGCCTGGATCACCTGCACAGCCTGGGTATCATTTACAGAGACCTCAAGCCTGAGAACATCCT
TCTGGATGAGGAGGGCCACATCAAACTCACTGACTTTGGCCTGAGCAAAGAGGCCATTGACCACGAGAAGAAG
GCCTATTCTTTCTGCGGGACAGTGGAGTACATGGCCCCTGAGGTCGTCAACCGCCAGGGCCACTCCCATAGTG
CGGACTGGTGGTCCTATGGGGTGTTGATGTTTGAGATGCTGACGGGCTCCCTGCCCTTCCAGGGGAAGGACCG
GAAGGAGACCATGACACTGATTCTGAAGGCGAAGCTAGGCATGCCCCAGTTTCTGAGCACTGAAGCCCAGAGC
CTCTTGCGGGCCCTGTTCAAGCGGAATCCTGCCAACCGGCTCGGCTCCGGCCCTGATGGGGCAGAGGAAATCA
AGCGGCATGTCTTCTACTCCACCATTGACTGGAATAAGCTATACCGTCGTGAGATCAAGCCACCCTTCAAGCC
AGCAGTGGCTCAGCCTGATGACACCTTCTACTTTGACACCGAGTTCACGTCCCGCACACCCAAGGATTCCCCA
GGCATCCCCCCCAGCGCTGGGGCCCATCAGCTGTTCCGGGGCTTCAGCTTCGTGGCCACCGGCCTGATGGAAG
ACGACGGCAAGCCTCGTGCCCCGCAGGCACCCCTGCACTCGGTGGTACAGCAACTCCATGGGAAGAACCTGGT
TTTTAGTGACGGCTACGTGGTAAAGGAGACAATTGGTGTGGGCTCCTACTCTGAGTGCAAGCGCTGTGTCCAC
AAGGCCACCAACATGGAGTATGCTGTCAAGGTCATTGATAAGAGCAAGCGGGATCCTTCAGAAGAGATTGAGA
TTCTTCTGCGGTATGGCCAGCACCCCAACATCATCACTCTGAAAGATGTGTATGATGATGGCAAACACGTGTA
CCTGGTGACAGAGCTGATGCGGGGTGGGGAGCTGCTGGACAAGATCCTGCGGCAGAAGTTCTTCTCAGAGCGG
GAGGCCAGCTTTGTCCTGCACACCATTGGCAAAACTGTGGAGTATCTGCACTCACAGGGGGTTGTGCACAGGG
ACCTGAAGCCCAGCAACATCCTGTATGTGGACGAGTCCGGGAATCCCGAGTGCCTGCGCATCTGTGACTTTGG
TTTTGCCAAACAGCTGCGGGCTGAGAATGGGCTCCTCATGACACCTTGCTACACAGCCAACTTTGTGGCGCCT
GAGGTGCTGAAGCGCCAGGGCTACGATGAAGGCTGCGACATCTGGAGCCTGGGCATTCTGCTGTACACCATGC
TGGCAGGATATACTCCATTTGCCAACGGTCCCAGTGACACACCAGAGGAAATCCTAACCCGGATCGGCAGTGG
GAAGTTTACCCTCAGTGGGGGAAATTGGAACACAGTTTCAGAGACAGCCAAGGACCTGGTGTCCAAGATGCTA
CACGTGGATCCCCACCAGCGCCTCACAGCTAAGCAGGTTCTGCAGCATCCATGGGTCACCCAGAAAGACAAGC
TTCCCCAAAGCCAGCTGTCCCACCAGGACCTACAGCTTGTGAAGGGAGCCATGGCTGCCACGTACTCCGCACT
CAACAGCTCCAAGCCCACCCCCCAGCTGAAGCCCATCGAGTCATCCATCCTGGCCCAGCGGCGAGTGAGGAAG
TTGCCATCCACCACCCTGTGAGGCACCAGGGCATTCGGGCCACAGGGCGGTGCTAGCTTGACACAGTCAGCAT
GCTTCCCAGAGGGAGCAGGCCGG
  (SEQ ID NO: 191)
MEQDPKPPRLRLWALIPWLPRKQRPRISQTSLPVPGPGSGPQRDSDEGVLKEISITHHVKAGSEKADPSHFEL
LKVLGQGSFGKVFLVRKVTRPDSGHLYAMKVLKKATLKVRDRVRTKMERDILADVNHPFVVKLHYAFQTEGKL
YLILDFLRGGDLFTRLSKEVMFTEEDVKFYLAELALGLDHLHSLGIIYRDLKPENILLDEEGHIKLTDFGLSK
EAIDHEKKAYSFCGTVEYMAPEVVNRQGHSHSADWWSYGVLMFEMLTGSLPFQGKDRKETMTLILKAKLGMPQ
FLSTEAQSLLRALFKRNPANRLGSGPDGAEEIKRHVFYSTIDWNKLYRREIKPPFKPAVAQPDDTFYFDTEFT
SRTPKDSPGIPPSAGAHQLFRGFSFVATGLMEDDGKPRAPQAPLHSVVQQLHGKNLVFSDGYVVKETIGVGSY
SECKRCVHKATNMEYAVKVIDKSKRDPSEEIEILLRYGQHPNIITLKDVYDDGKHVYLVTELMRGGELLDKIL
RQKFFSEREASFVLHTIGKTVEYLHSQGVVHRDLKPSNILYVDESGNPECLRICDFGFAKQLRAENGLLMTPC
YTANFVAPEVLKRQGYDEGCDIWSLGILLYTMLAGYTPFANGPSDTPEEILTRIGSGKFTLSGGNWNTVSETA
KDLVSKMLHVDPHQRLTAKQVLQHPWVTQKDKLPQSQLSHQDLQLVKGAMAATYSALNSSKPTPQLKPIESSI
LAQRRVRKLPSTTL*
```

[0156] An amino acid sequence for the protein encoded by the SBNO2 gene that is a regulator of T cell exhaustion/dysfunction resistance is available from the UniPROT database at accession no. Q9Y2G9, cDNA NM_001100122, with gene location at Chr 19: 1107637-1174268.

(SEQ ID NO: 192)
AATGCTGGGGCTGCTGCCGCGGTCATGAGGGAGCCGCTCCCGGGCAGCGCTTCCTGGGGGACCCCTGGCCCCC
CGAGCGCCGGGACCATGTCCCAGCTGCAGCTGTGGCTGCAGTTTGAGGCTCTGAACAAGGACTCCTCCTATTT
TGAGGACTTCTCCAACATCTCCATCTTCTCCTCGTCCGTGGACTCCCTGTCGGACATCGTGGACACGCCCGAC
TTCCTGCCGGCTGACAGCCTCAACCAGGTGTCCACCATCTGGGACGATAACCCTGCCCCCTCCACCCACGATA
AGCTGTTCCAGCTCAGCAGGCCGTTTGCAGGCTTCGAGGACTTTCTGCCCTCCCACAGCACCCCGCTTCTCGT
CAGCTACCAGGAGCAGAGTGTGCAGAGCCAGCCAGAGGAGGAGGACGAGGCTGAGGAGGAGGAGGCGGAGGAG
CTGGGGCACACAGAGACCTACGCCGACTACGTGCCGTCCAAGTCCAAGATCGGGAAGCAGCACCCAGACCGCG
TGGTGGAGACCAGCACACTGTCCAGCGTCCCACCCCCAGACATCACCTACACCCTGGCCCTGCCCTCGGACAG
CGGGGCCCTGTCTGCCCTGCAGCTAGAGGCCATCACCTACGCCTGCCAGCAACACGAGGTCCTGCTCCCCAGC
GGGCAGCGCGCGGGCTTTCTCATCGGCGATGGGGCCGGCGTGGGCAAAGGCCGGACGGTGGCCGGAGTCATCC
TGGAGAACCACCTGCGCGGCCGGAAGAAAGCATTGTGGTTCAGCGTCTCCAACGACCTCAAGTACGATGCGGA
GCGCGACCTGCGGGACATCGAAGCCACGGGCATCGCGGTGCACGCGCTCAGCAAGATCAAGTACGGTGACACC
ACTACCTCAGAGGGCGTCCTCTTCGCCACCTACTCCGCCCTGATTGGGGAGAGCCAGGCCGGCGGCCAGCACC
GCACTCGCCTCCGGCAGATCCTGGACTGGTGTGGGGAGGCCTTCGAGGGCGTCATCGTGTTCGACGAGTGTCA
CAAAGCCAAGAATGCCGGCTCCACCAAGATGGGCAAGGCTGTGCTAGACCTGCAGAACAAGCTGCCCCTGGCC
CGCGTGGTCTACGCCAGCGCCACAGGTGCCTCTGAGCCTCGGAACATGATCTACATGAGCCGCTTGGGTATCT
GGGGCGAGGGCACACCCTTCCGGAACTTTGAGGAGTTCCTGCACGCCATCGAGAAGAGGGGCGTTGGCGCCAT
GGAGATCGTGGCCATGGACATGAAGGTCAGCGGCATGTACATCGCACGCCAGCTCAGCTTCTCCGGCGTCACC
TTCCGCATCGAGGAGATCCCGCTGGCCCCAGCCTTCGAGTGCGTCTACAACCGCGCGGCCCTGCTGTGGGCCG
AGGCCCTGAACGTGTTCCAGCAGGCGGCCGACTGGATCGGCCTGGAGTCGCGCAAGTCCCTGTGGGGCCAGTT
CTGGTCGGCACACCAGCGCTTCTTCAAGTATCTGTGCATCGCAGCCAAGGTGCGCCGGCTGGTGGAGCTGGCC
CGAGAGGAGCTGGCGCGAGACAAGTGCGTGGTCATCGGGCTGCAGTCCACGGGCGAGGCGCGCACGCGGGAGG
TGCTGGGGGAGAACGATGGGCACCTCAACTGCTTCGTCTCGGCCGCTGAAGGCGTGTTCCTGTCGCTAATTCA
GAAGCACTTTCCGTCCACCAAGAGAAAGCGGGACAGAGGAGCGGGCAGCAAGCGGAAACGGCGACCTCGGGGA
CGCGGGGCCAAAGCCCCCCGGCTGGCGTGCGAGACAGCGGGCGTCATCCGCATCAGTGACGACAGCAGCACGG
AGTCGGACCCTGGCCTGGACAGCGACTTCAACTCCTCCCCCGAGTCCCTGGTGGATGACGACGTTGTCATCGT
TGATGCAGTCGGGCTCCCCAGTGACGACCGGGGACCCCTGTGCCTCCTGCAGAGAGACCCGCATGGCCCCGGG
GTCCTGGAGCGGGTGGAGCGGCTGAAGCAGGATCTGCTGGACAAAGTGCGGCGGCTGGGCCGGGAACTGCCAG
TCAACACCCTGGACGAGCTCATCGACCAGCTGGGCGGCCCCCAGCGGGTGGCGGAGATGACCGGCAGGAAAGG
CCGCGTGGTGTCCAGGCCCGACGGGACGGTGGCCTTCGAGTCGCGGGCAGAGCAGGGTCTGTCCATCGACCAC
GTGAACCTCAGGGAGAAGCAGCGCTTCATGAGCGGCGAGAAGCTCGTGGCCATCATCTCGGAGGCCTCCAGCT
CGGGTGTCTCCCTCCAAGCCGACCGCCGTGTCCAGAACCAGCGGCGCCGCGTGCACATGACCTTGGAGCTGCC
GTGGAGCGCCGACCGCGCCATCCAGCAGTTCGGCCGCACCCACCGGTCCAACCAGGTCTCCGCGCCAGAGTAT
GTCTTCCTCATCTCGGAGCTGGCCGGGGAGCGCCGGTTCGCCTCCATCGTGGCCAAGCGCCTGGAGAGTCTGG
GGGCCCTGACCCACGGAGACCGCCGCGCCACGGAGTCCCGTGACCTCAGCAAGTACAACTTTGAGAACAAGTA
TGGCACCCGGGCCCTGCACTGTGTCCTCACCACCATCCTGAGCCAGACTGAGAACAAAGTGCCTGTGCCCCAG
GGATACCCTGGAGGGGTCCCCACCTTCTTCCGGGACATGAAGCAGGGCCTGCTGTCTGTGGGCATTGGTGGCC
GGGAGTCCCGGAATGGCTGCCTGGACGTGGAGAAGGACTGTTCCATCACCAAGTTCCTGAACCGCATCCTGGG
GCTGGAGGTGCACAAGCAGAACGCCCTGTTCCAGTACTTCTCAGACACCTTCGACCACCTCATCGAGATGGAC
AAGCGGGAGGGCAAATACGACATGGGCATCCTGGACCTTGCTCCCGGTATCGAGGAGATCTACGAGGAGAGCC
AGCAGGTGTTCCTGGCTCCCGGGCACCCGCAGGACGGGCAGGTGGTCTTCTACAAGATCAGCGTGGACCGCGG
CCTGAAGTGGGAGGACGCCTTTGCCAAGTCGCTGGCGCTGACGGGCCCCTATGACGGCTTCTACCTCTCCTAC
AAGGTCCGCGGTAACAAGCCCAGCTGCCTGCTGGCGGAGCAGAACCGCGGCCAGTTCTTCACGGTGTACAAGC
CCAACATCGGCCGGCAGAGCCAGCTGGAGGCCCTGGACAGCCTCCGCCGCAAGTTCCACCGGGTCACCGCGGA
GGAGGCCAAGGAGCCCTGGGAGAGTGGCTACGCTTTGTCGCTGACGCACTGCAGCCACAGCGCCTGGAACCGG
CACTGCCGGCTGGCGCAGGAGGGTAAGGACTGCCTGCAGGGGCTGCGGCTGCGGCACCACTACATGCTGTGCG
GCGCGCTGCTGCGCGTGTGGGGCCGCATCGCCGCCGTCATGGCCGACGTCAGCAGCAGCAGCTACCTGCAGAT
CGTGCGGCTGAAGACCAAGGACAGGAAGAAGCAAGTGGGCATCAAGATCCCCGAGGGCTGCGTGCGCCGGGTG
CTGCAGGAGCTGCGGCTGATGGATGCGGACGTGAAGCGCAGGCAGGCGCCCGCCCTGGGCTGCCCCGCCCCGC
CCGCCCCGCGCCCGCTGGCGCTGCCTTGCGGCCCCGGAGAGGTGCTGGACCTCACCTACAGCCCCCCGGCCGA
GGCCTTCCCGCCGCCCCCGCACTTCTCTTTCCCGGCGCCGCTGTCCCTGGACGCCGGCCCCGGCGTCGTGCCG
CTGGGCACCCCCGACGCCCAGGCCGACCCTGCGGCCCTCGCGCACCAGGGCTGCGACATCAACTTCAAGGAGG
TGCTGGAGGACATGCTGCGCTCGCTGCACGCGGGGCCGCCCTCCGAGGGCGCGCTGGGGGAGGGCGCGGGGGC
GGGGGGCGCGGCGGGCGGTGGTCCCGAGCGGCAGAGCGTGATCCAGTTCAGCCCACCCTTCCCCGGCGCCCAG
GCTCCTCTCTGACACGCCTTTAGGCGAAACATGCCCCAAGACACAGGGACCGTTTCTCCCCTAGGAGCAGCGG
TGGGGAGCAGGGCCAAGGTCCCCTGACCACTGCTCAGAGGAGCCCTAGGCCCTGGCCGCAGTGCCTTCAGCGC
CCGACCCGGGCCCCCACCTGGTCAGCCCTGGCGGGGCCCACTCAGGACAGCTGGGGGCCGGGGCGTGGCAGGG
CCCTCTCTGTGCCTCTCCTCCCAAGTAGGAAGGGGCTCCGGGTGGCTGCTCTGGGACTGGGCACCCACAAGGG
CTCAGTGGGCCCAAACCCTTGAAATCCGTGAAACCGGGTGGTCCCAAGAGCTAGAAACTCAGGAAACCCCAGG
TGCTCAGGGCCCCGCGTCTCGGGGGCTCCGTGGGGCAGACCCCTGCTAATATATGCAATTCTCCCTCCCCCAG
CCCTTCCCTGACCCCTAAGTTATTGCCCGCTCACCTCTCCCAGGCCCCAGGCCGCGGAGCTGGCAGGGTGGCG
CCTGCGGTTTCTATGTATTTATAGCAAGTTCTGATGTACATATGTAAAGGACTTTTTTAAATATATGTGCCTT
TTGCCTACTTC
(SEQ ID NO: 193)
MREPLPGSASWGTPGPPSAGTMSQLQLWLQFEALNKDSSYFEDFSNISIFSSSVDSLSDIVDTPDFLPADSLN
QVSTIWDDNPAPSTHDKLFQLSRPFAGFEDFLPSHSTPLLVSYQEQSVQSQPEEEDEAEEEEAEELGHTETYA
DYVPSKSKIGKQHPDRVVETSTLSSVPPPDITYTLALPSDSGALSALQLEAITYACQQHEVLLPSGQRAGFLI
GDGAGVGKGRTVAGVILENHLRGRKKALWFSVSNDLKYDAERDLRDIEATGIAVHALSKIKYGDTTTSEGVLF
ATYSALIGESQAGGQHRTRLRQILDWCGEAFEGVIVEDECHKAKNAGSTKMGKAVLDLQNKLPLARVVYASAT
GASEPRNMIYMSRLGIWGEGTPFRNFEEFLHAIEKRGVGAMEIVAMDMKVSGMYIARQLSESGVTFRIEEIPL
APAFECVYNRAALLWAEALNVFQQAADWIGLESRKSLWGQFWSAHQRFFKYLCIAAKVRRLVELAREELARDK
CVVIGLQSTGEARTREVLGENDGHLNCFVSAAEGVFLSLIQKHFPSTKRKRDRGAGSKRKRRPRGRGAKAPRL
ACETAGVIRISDDSSTESDPGLDSDENSSPESLVDDDVVIVDAVGLPSDDRGPLCLLQRDPHGPGVLERVERL
KQDLLDKVRRLGRELPVNTLDELIDQLGGPQRVAEMTGRKGRVVSRPDGTVAFESRAEQGLSIDHVNLREKQR
FMSGEKLVAIISEASSSGVSLQADRRVQNQRRRVHMTLELPWSADRAIQQFGRTHRSNQVSAPEYVFLISELA
GERRFASIVAKRLESLGALTHGDRRATESRDLSKYNFENKYGTRALHCVLTTILSQTENKVPVPQGYPGGVPT
FFRDMKQGLLSVGIGGRESRNGCLDVEKDCSITKFLNRILGLEVHKQNALFQYFSDTFDHLIEMDKREGKYDM
GILDLAPGIEEIYEESQQVFLAPGHPQDGQVVFYKISVDRGLKWEDAFAKSLALTGPYDGFYLSYKVRGNKPS
CLLAEQNRGQFFTVYKPNIGRQSQLEALDSLRRKFHRVTAEEAKEPWESGYALSLTHCSHSAWNRHCRLAQEG
KDCLQGLRLRHHYMLCGALLRVWGRIAAVMADVSSSSYLQIVRLKTKDRKKQVGIKIPEGCVRRVLQELRLMD
ADVKRRQAPALGCPAPPAPRPLALPCGPGEVLDLTYSPPAEAFPPPPHFSFPAPLSLDAGPGVVPLGTPDAQA
DPAALAHQGCDINFKEVLEDMLRSLHAGPPSEGALGEGAGAGGAAGGGPERQSVIQFSPPFPGAQAPL*

[0157] An amino acid sequence for the protein encoded by the SND1 gene that is a regulator of T cell exhaustion/dysfunction resistance is available from the UniPROT database at accession no. Q7KZF4, cDNA NM_014390, with gene location at Chr 7: 127652194-128092609.

```
  (SEQ ID NO: 194)
CTCTTTCGCTCCGTGTCCCGCTGCTGCTCCTGTGAGCGCCCGGCGAGTCCGTCCCGTCCACCGTCCGCAGCTG
GTAGCCAGCCTGCCCCTCGCCTCGACTCCCTTTCACCAACACCGACACCCACATTGACACCTCCAGTCCGGCC
AGCCGCTCCACTCGTTGCCTTTGCATCTCCACACATGGCGTCCTCCGCGCAGAGCGGCGGCTCCTCCGGGGGA
CCCGCGGTCCCCACCGTGCAGCGGGGCATCATCAAGATGGTCCTCTCAGGGTGCGCCATCATTGTCCGAGGTC
AGCCTCGTGGTGGGCCTCCTCCTGAGCGGCAGATCAACCTCAGCAACATTCGTGCTGGAAATCTTGCTCGCCG
GGCAGCCGCCACACAACCTGATGCAAAGGATACCCCTGATGAGCCCTGGGCATTTCCAGCTCGAGAGTTCCTT
CGAAAGAAGCTGATTGGGAAGGAAGTCTGTTTCACGATAGAAAACAAGACTCCCCAGGGGCGAGAGTATGGCA
TGATCTACCTTGGAAAAGATACCAATGGGGAAAACATTGCAGAATCACTGGTTGCAGAGGGCTTAGCCACCCG
GAGAGAAGGCATGAGAGCTAATAATCCTGAGCAGAACCGGCTTTCAGAATGTGAAGAACAAGCAAAGGCAGCC
AAGAAAGGGATGTGGAGTGAGGGGAACGGTTCACATACTATCCGGGATCTCAAGTATACCATTGAAAACCCAA
GGCACTTTGTGGACTCACACCACCAGAAGCCTGTTAATGCTATCATCGAGCATGTGCGGGACGGCAGTGTGGT
CAGGGCCCTGCTCCTCCCAGATTACTACCTGGTTACAGTCATGCTGTCAGGCATCAAGTGCCCAACTTTTCGA
CGGGAAGCAGATGGCAGTGAAACTCCAGAGCCTTTTGCTGCAGAAGCCAAATTTTTCACTGAGTCGCGACTGC
TTCAGAGAGATGTTCAGATCATTCTGGAGAGCTGCCACAACCAGAACATTCTGGGTACCATCCTTCATCCAAA
TGGCAACATCACAGAGCTCCTCCTGAAGGAAGGTTTCGCACGCTGTGTGGACTGGTCGATTGCAGTTTACACC
CGGGGCGCAGAAAAGCTGAGGGCGGCAGAGAGGTTTGCCAAAGAGCGCAGGCTGAGAATATGGAGAGACTATG
TGGCTCCCACAGCTAATTTGGACCAAAAGGACAAGCAGTTTGTTGCCAAGGTGATGCAGGTTCTGAATGCTGA
TGCCATTGTTGTGAAGCTGAACTCAGGCGATTACAAGACGATTCACCTGTCCAGCATCCGACCACCGAGGCTG
GAGGGGGAGAACACCCAGGATAAGAACAAGAAACTGCGTCCCCTGTATGACATTCCTTACATGTTTGAGGCCC
GGGAATTTCTTCGAAAAAAGCTTATTGGGAAGAAGGTCAATGTGACGGTGGACTACATTAGACCAGCCAGCCC
AGCCACAGAGACAGTGCCTGCCTTTTCAGAGCGTACCTGTGCCACTGTCACCATTGGAGGAATAAACATTGCT
GAGGCTCTTGTCAGCAAAGGTCTAGCCACAGTGATCAGATACCGGCAGGATGATGACCAGAGATCATCACACT
ACGATGAACTGCTTGCTGCAGAGGCCAGAGCTATTAAGAATGGCAAAGGATTGCATAGCAAGAAGGAAGTGCC
TATCCACCGTGTTGCAGATATATCTGGGGATACCCAAAAAGCAAAGCAGTTCCTGCCTTTTCTTCAGCGGGCA
GGTCGTTCTGAAGCTGTGGTGGAATACGTCTTCAGTGGTTCTCGTCTCAAACTCTATTTGCCAAAGGAAACTT
GCCTTATCACCTTCTTGCTTGCAGGCATTGAATGCCCCAGAGGAGCCCGAAACCTCCCAGGCTTGGTGCAGGA
AGGAGAGCCCTTCAGCGAGGAAGCTACACTTTTCACCAAGGAACTGGTGCTGCAGCGAGAGGTGGAGGTGGAG
GTGGAGAGCATGGACAAGGCCGGCAACTTTATCGGCTGGCTGCACATCGACGGTGCCAACCTGTCCGTCCTGC
TGGTGGAGCACGCGCTCTCCAAGGTCCACTTCACCGCCGAACGCAGCTCCTACTACAAGTCCCTGCTGTCTGC
CGAGGAGGCCGCAAAGCAGAAGAAAGAGAAGGTCTGGGCCCACTATGAGGAGCAGCCCGTGGAGGAGGTGATG
CCAGTGCTGGAGGAGAAGGAGCGATCTGCTAGCTACAAGCCCGTGTTTGTGACTGAGATCACTGATGACCTGC
ACTTCTACGTGCAGGATGTGGAGACCGGCACCCAGTTGGAGAAGCTGATGGAGAACATGCGCAATGACATTGC
CAGTCACCCCCCTGTAGAGGGCTCCTATGCCCCCCGCAGGGGAGAGTTCTGCATTGCCAAATTTGTAGATGGA
GAATGGTACCGTGCCCGAGTAGAGAAAGTCGAGTCTCCTGCCAAAATACATGTCTTCTACATTGACTACGGCA
ACAGAGAGGTCCTGCCATCCACCCGCCTGGGTACCCTATCACCTGCCTTCAGCACTCGGGTGCTGCCAGCTCA
AGCCACGGAGTATGCCTTCGCCTTCATCCAGGTGCCCCAAGATGATGATGCCCGCACGGACGCCGTGGACAGC
GTAGTTCGGGATATCCAGAACACTCAGTGCCTGCTCAACGTGGAACACCTGAGTGCCGGCTGCCCCCATGTCA
CCCTGCAGTTTGCAGATTCCAAGGGCGATGTGGGGCTGGGCTTGGTGAAGGAAGGGCTGGTCATGGTGGAGGT
GCGCAAGGAGAAACAGTTCCAGAAAGTGATCACAGAATACCTGAATGCCCAAGAGTCAGCCAAGAGCGCCAGG
CTGAACCTGTGGCGCTATGGAGACTTTCGAGCTGATGATGCAGACGAATTTGGCTACAGCCGCTAAGGAGGGG
ATCGGGTTTGGCCCCCAGCCCCGCTCACGCCAGTCCCTCTTCCTCTGCCGGGAGGGTGTTTTCAACTCCAAAC
CCCAGAGAGGGGTTGTAGATTGGGTCCAGCTTTGCTTCAGTGTGTGGAAATGTCTCGTGGGGTGGCATCGGGG
CTGCGGGGTGGGGACCCCAAGGCTTTCTGGGGCAGACCCTTGTCCTCTGGGATGATGGGCACTGCTATCCACA
GTCTCTGCCAGTTGGTTTTATTTGGAGGTTTGTGGGCTTTTTTTAAAAAAAAAAAGTCCTCAAATCAGGAAGA
AACATCAAAGACTATGTCCTAGTGGAGGGAGTAATCCTAACACCCAGGCTGGCCGCCAGCTGGCACCTGCCTC
TATCCCAGACTGCCCTCGTCCCAGCTCTCTGTCCAACTGTTGATTATGTGATTTTTCTGATACGTCCATTCTC
AAATGCCAGTGTGTTCACATCTTCGCTCTGGCCAGCCCATTCTGTATTTAAAGCTTTTGAGGCCCAATAAAAT
AGTACGTGCTGTCTGCA
  (SEQ ID NO: 195)
MASSAQSGGSSGGPAVPTVQRGIIKMVLSGCAIIVRGQPRGGPPPERQINLSNIRAGNLARRAAATQPDAKDT
PDEPWAFPAREFLRKKLIGKEVCFTIENKTPQGREYGMIYLGKDTNGENIAESLVAEGLATRREGMRANNPEQ
NRLSECEEQAKAAKKGMWSEGNGSHTIRDLKYTIENPRHFVDSHHQKPVNAIIEHVRDGSVVRALLLPDYYLV
TVMLSGIKCPTFRREADGSETPEPFAAEAKFFTESRLLQRDVQIILESCHNQNILGTILHPNGNITELLLKEG
FARCVDWSIAVYTRGAEKLRAAERFAKERRLRIWRDYVAPTANLDQKDKQFVAKVMQVLNADAIVVKLNSGDY
KTIHLSSIRPPRLEGENTQDKNKKLRPLYDIPYMFEAREFLRKKLIGKKVNVTVDYIRPASPATETVPAFSER
TCATVTIGGINIAEALVSKGLATVIRYRQDDDQRSSHYDELLAAEARAIKNGKGLHSKKEVPIHRVADISGDT
QKAKQFLPFLQRAGRSEAVVEYVESGSRLKLYLPKETCLITFLLAGIECPRGARNLPGLVQEGEPFSEEATLE
TKELVLQREVEVEVESMDKAGNFIGWLHIDGANLSVLLVEHALSKVHFTAERSSYYKSLLSAEEAAKQKKEKV
WAHYEEQPVEEVMPVLEEKERSASYKPVFVTEITDDLHFYVQDVETGTQLEKLMENMRNDIASHPPVEGSYAP
RRGEFCIAKFVDGEWYRARVEKVESPAKIHVFYIDYGNREVLPSTRLGTLSPAFSTRVLPAQATEYAFAFIQV
PQDDDARTDAVDSVVRDIQNTQCLLNVEHLSAGCPHVTLQFADSKGDVGLGLVKEGLVMVEVRKEKQFQKVIT
EYLNAQESAKSARLNLWRYGDFRADDADEFGYSR*
```

[0158] An amino acid sequence for the protein encoded by the ST8SIA5 gene that is a regulator 55 of T cell exhaustion/dysfunction resistance is available from the UniPROT database at accession no. 015466. cDNA NM_001307986, with gene location at Chr 18: 46667821-46759257.

```
  (SEQ ID NO: 196)
AAATCGGCGGCTACCCGGCACCGGCGCCTGGAGGTAAAGGTACCCGGGGGTGGGGAAGGCCCCTGGCCGCGGC
AGAGCTCCCTGCCACCGGCCCTGTCCTGCTTGCCGCCCCAGCGCCTGCGACGCTTGGATGCCCCCAGCTCCGG
CCGCGCCAACCAGAAACTTTGCCCCTCGAAGTCCCCCGCCTGCCTGACCGCACCGTGAGGCGCCAAGTCGGCC
GCGCGCCCCCCGGGGCCCCGGAACCCCGCGAGTCATTGCCTGGCCGCCCCGTACCCCGCGCCCGCGGCGCCCG
GTAGCCAGGATGCGCTACGCGGACCCCTCGGCCAACCGGGATTTGTTGGGGAGCCGAACTTTGCTCTTCATCT
TCATCTGCGCCTTTGCCTTGGTGACCTTGCTGCAACAGATCCTGTATGGCAGGAACTACATTAAGAGAGGCCT
CCAGTTTGGTTGGCAGAGTGGTGACCAGCTGACCAATTGGACGGGGCTCTTTAATGTCACGGATGATCCAGCA
GTGCAGAGCGGCAGTGACTCCAGCTCCAGGTACTTTGAATTTTATGAGGGGCCTTTTGAATATAACTCCACAA
GATGCCTGGAGCTGAGGCACGAAATATTGGAAGTGAAGGTGCTGTCCATGGTGAAGCAGTCAGAGCTGTTCGA
CAGGTGGAAGAGCCTCCAGATGTGCAAATGGGCGATGAACATCTCTGAGGCCAACCAGTTCAAGTCTACTCTG
TCCAGGTGCTGCAACGCCCCTGCCTTTCTCTTCACCACCCAGAAGAACACTCCCCTGGGGACAAAGCTCAAGT
ATGAGGTGGACACCAGTGGCATCTACCACATCAACCAGGAGATCTTCCGCATGTTTCCCAAGGACATGCCCTA
CTACCGGTCCCAGTTTAAGAAGTGTGCTGTAGTGGGCAACGGAGGCATCTTGAAGAACAGCCGCTGCGGGAGG
GAGATCAACAGCGCCGACTTCGTCTTCCGGTGCAACCTGCCCCCCATCTCAGAGAAGTACACCATGGATGTGG
GGGTGAAGACGGATGTGGTCACTGTGAACCCCAGCATCATCACAGAGAGGTTCCACAAGCTGGAGAAGTGGCG
GCGGCCGTTCTATCGCGTGCTGCAGGTGTACGAGAACGCGTCGGTGCTGCTGCCTGCCTTCTACAACACGCGC
AACACCGACGTGTCCATCCGCGTCAAGTACGTGCTGGACGACTTCGAATCGCCGCAAGCTGTCTACTACTTCC
ATCCGCAGTACCTGGTCAACGTGTCGCGCTACTGGCTCAGCCTGGGGGTGCGCGCCAAGCGCATCAGCACCGG
CCTCATTCTGGTCACTGCGGCGCTGGAGCTCTGTGAGGAGGTGCACCTCTTTGGCTTCTGGGCCTTCCCCATG
AACCCCTCGGGCCTCTACATCACTCACCACTACTATGACAACGTCAAGCCGCGTCCCGGCTTCCACGCCATGC
CCTCTGAGATCTTCAACTTCCTGCACTTGCACAGCCGAGGCATCCTCCGCGTGCACACGGGCACCTGCAGCTG
CTGCTGATGGCTGCCAGCCAGGCTGCCCGGCAAGCGGCGCCCCCTCTCCTGCTGTCCCTCCTGGTGGAACTGG
GAGCCCCGAACCGGGCAGCGTGGGGTCCTGGCGTTCAGGCTGTCTCTCCCTCCATTGTTCAGCTCTGTACTTG
GATCCTGGGGTAGGGAGGCAGGGTTAGGAACCGGGGCAGAGTCAGCTCTGTGCTGAGCCTCCTGGCCTGGCCC
CCACCGGTGCATCCGCCCAGTGCGTCCACCTGCCCTGGCTAGCATGCTGCTGGGCCACACCCCAAGATCAGGG
GCCCTGGGGACGGCAAGTGAATAAAGCACATTTCCACCCAATTTTGTCATCCGAGAGAGAGCACAAACTGCAG
GCCCTTGTTGCAGCTGAAGGAAGACCCTACAGAGAATGGAATTGAGAGTGGAGACAGGACACTTCACAGGACA
CTTGAGCACAGTCAAGATTTTATTCACACTTTTGGTTCCTGTGTTTTATATCGAAGACTTAGCTATGAATTGC
TATCTAAATCTCAGAGCTTAGAAGCCAACCCAGTGACTAGACCTTCCAGTGAAGAAAGTGATCTCAAGAGGTC
CAGGGACTTAACAGCCAAGCCACACCACCCGACAGGTTCTTCTGTGACACCGAGAGATCTAACCCAAGGCCTG
GGTTATGTCTTAGTCGAGACATCATCATCTGAGAAGCACCACATCCTTTCAGACACATCCTCGGACACACATG
CGGTCTTGGTGCCCCCAGGTTCAATCCTGCGTTAGCTCTTTTGATGAGAAGGAAATAAACCAAACCAGCCACT
TGCACTATGGCTTCCAAGCCAATGTTATTGACTCAATAAGTGCTTAGCAATTGGCTTCCTCTTTTGTCTTCCT
ATTTTCAGCTCCATTTAAACCAGGAGTTATTTATAAAGACCTCTTCCTCTCATGTCTCTGAATCCTGCAGAAT
CCTGCTGTATCGTGTTCCTCAGTCGGAACCATAGGCTCTGGGCTGGAAAGCACTGACATGTCAGGTGGTGAGC
TTAGCAGAGAGAAACGAGTTGTGGCCTCCGACACCAGCATCACTGAGGCTTCCGCTGTGAAGGCGGGACTTCT
CACAGCAGACCCCAGGGCCTGGGCTTGGGGCAGTCAGCTGGGCTTAGGCAGAGAGGGGTTCACATATCATTTC
ACATCTGAAATTAATTCCCTTTGCTTCTCCCTGTGGTGTTTCCACCATAAATGGGATGGTGTCTAAGAGACAC
TGTTGGTGAACTAACTGCCTTAGAACTTAGCTTTGTGGAATCATAGGATGTTAGTGCTGGGAGGAGGACTTCA
GCCTACCTGCCTGGCAACCTGTCTCCCTCCCTCCTTCCTTTCTCCCTGCCTCCTCCCCTTTCTCCTTCCCTCC
CTTCCTCTTTTCTTCCTCCCCTTAAACATTTCTGGAAAGCCTATTCTGCTTTGGTCTGTGGTTGGACTTAGGA
AGACATAAGGATAAACAAAGGCATTATCTGTGTCTTCTGGGGGTGCAGGGCCCAGAGATTATAGACCCAGTCC
CACGTGCTGGGTGCTCTGGGAGGGTTAGGAGCTGTAAGAGTCTATCAGGGAGTGGGATCTGCTATCCAATCAC
CTCATTTGACAGGCCCCCCGGCTGAGCCAGTCAGGGACGTGGAGAGTGCAGGCTTTATCCCAGGCCTCCAGGC
TCCTGATCCAGGGCTCCGTTCTTGGCCAAACTTTTGTGTCTTGGCTTGGGCTTCCTGTGGGGGGGTTGTTGTG
GAACCTGTGCCCTGTGCACAACACTGTTCTCAGTGCTGACTCTCACCTGCATTCTGAGCTCTGGTCCTGGTTG
GGAAAACCTCAGGTGGCTCTGAGTCTCAGTCTGCTGGTCAGGAATGTAGGGGAGTAGCCAAGGGGATGAAATG
ATCCCAAACACCTGCTAAACCAGGAAGAACTGCAAAGGACAGTGGATGGTTATTACTTGCTTGAGCTCTGCCT
ATTTCTCCCAGGGAGGGAATTTCTGGGAAAGATTCCAGTTACCTGAGATTTCTAGCCACTGCATGGTTAATTG
AACCCAGTTCTTGAAACCATGGAATATAAAAACTAGAAGGTTCTTAAAGACCATTTTGTTCCACTTTAGGAAA
CAGGCCCAGAGCAAAGATGTGACTGGGTCAAGTCATGCCTGGGGCTCTACTGAGTGCCTGCTGTGGACAGAGC
CCTCTACTGGAAGCCCTCTGGGTACTAGTTATGTTCCAGATGGGCAGTGTTTGGGGGAGGCTCCCTGGTGACA
CAGACATCAGGATTCCCACAGCTGAGGGTGTTGCAGGTTGGAATCTGCCCCAGCCAGGGCCCTCGTAGGAGCT
GAGGATTGGAGCATCGGGATCCAGCCCACAGAGGAGTTGGGACACCTGGCTGCTGGCCATATTCCTGCCTGTG
GGTCTTAGGGCCAGTCCTTCCTCTCCCTCAATGTCTCAGTTTCCTCATCTCTACAACTAGAAGCTTTGTAAAA
ATCTTCAGCGTCTGTACAATGTCCTTATTTTGGGGGGACATTCATGATGAATGGATCTAAACCATAATTAATA
TTTCTCATTATACTAGCTAGCATTTATCAAGCTACGTTAAGCACTTTCCCTATATTATCTCCTGTAATCATCA
TGAGACCCCTTTGGGTAAGGAGGCTCCCATTGTACAGATGAGGAGACAGAGGCTTAAAGCAATTCCAGGACTT
GCCCTTGGTCAGGCACCCAATGGAGGGAACGGCACCCAATGGAGGGAACTGCACCCAGATCTGTAGAGCCCCA
AAGTCTGTGCTCCAAACCTCTGTCTTAGCTTCCCAGACAGTGACACCAGAACATGAGGGATCCTGACCAAGAT
GCCCCTGCAGGATAGTACGGGGCCCTCCTCCAGGGACAAATGCTCTAGGAGGCTGTCATCGTCCGGGAAGCAG
CCTGTGCTTATAGGTGCCTCTCCCTAACCCTGCCGCCTACAGCAGTAGCGACTTACCCACAGTGGCACTGGAG
GGGAACTGAGGCCATCGTCACATTTTTAAGGTGAGGAAAGATGCCCAGAGATAGCACATGTTAAGTGACAACA
GAATGACTTGCCCAGGGCTACATGGCCAGCTTGTGGCTCAACTGGGACTCACCAGTCTCCTGACTTTCAGGA
TATAGTTTTTCTGCTGCAGCCAGTGTTTATAAGAAAAACATTTTTTCAAAGGCTCAGAGAGACCTGGTGTTGA
CTCTGGAAGCCTTCTGCCATGTTCCTCCACAGCCCTGTCACCACGCCACCATGCAGTGCAGACTACCCATTGA
ATTATTATTCAAGGGAAATCGATTCCCGTAAACAAAACAACCATCATGTCTTCCTTTGTGCTAAACCCACTGC
TCCAGGCTTGAAAGGCAGCAAAAACAAGTAAATGACTCAGTGCTTAGCCAAGCACAAAGAAAGGTGGCTCAAG
GTCAGAGGCAGCGTCTGAGACCATTTCAGCAATGCTGCTGCGGCAGCTCTGCCCACTAATCACCTGGTGCCCA
GAGACAGCATGTGCTCATCGCCCTTGACTTTGCTGAGAGCAGGGAGGAAGCAGAGCAGTGCTTAGAAACAACT
GAGGCAGAGTAGAGTGCTGGCCAATTTAGTGAGTGAATTGGTGAATAAATTATATTTATTGAGTGCTCATGTT
GTGCCAGGCATGGTGCCAGGTGCCGGGGAGCTAGTGATGAACAAAACGTCGTCCCTGCCCTCCGGGAGTTTGT
GGTCTGGTGTGTGTGTATACAGACGTTAAATGACGAATCCCACAAACGTACGTGGGAGCTGGTTGTGCTGAAC
ACTATCAAATCCAGTCTCAGGGACAGTTATCTGGGAGAGGTGGAGGAGGGGATGACCAAAGTCAATTCCGAAT
TCTGAAGGTTGGCAGCATAAAAAGTGTAATGAGCAAAGCAGCAGATACTTCTCAGATATCATCCTTGACATCC
GTGTAACATTTGACAAGGTTGGCCTCTCTGGTCTTTTTTGTTTGTTTGTTTGAGACAGAGTCTCCCTCTGTCA
CCCAGGCTAGAGGGTGGTGATATAAATATGGCTCACTGCAGCCTCGACACCTGGGTTCAAGTGATCCTCCCAC
CTCAGCTTCCCAAGTAGCTAGGACCACAGGCACGTGCCATTGCTCCCAGCTAATTTGAAAATTTTTTTTTTTT
TGTAGAAACGGGGTTTTGCTATGTTGACGAGGCTAGTCTCGAACTCCTGAGCTCAAGCAATCCTCCTGCCTTG
GCCTCCCAAAGTGCTGGGATTACAGGTGTGAGCCACTATGCACAGTCTCTCTGGTCTTTCTAAAGTCCTCTCC
TCTTCTGTTTTCTAACTATTCTTCCCTGACTTTCCTCCTGTCTCTCTGAATGCTCCTTCTCAGGTTCCTTTGT
GGATTCATCTTCCGTGAAGCTTCCTCAGGGTTCTCTTCTCTTCCTAGGAGCATTCCTGCAGAAATCTCATCTA
TTCAAAGCCTTAAGTATCTTCTGCCCTGGCATCTTAACCCCTCTACCTGCAGGCCAGTCCTCCCTAGGAGCAT
TGGAAGCATGCTCACTGTGGCCTCCTGCATGTCTGTGTCTGCACAGCATCTCAGACCTCAACATGTCCTCAAC
TGGTATAGTTAAAAGAACAATCTGAACTCAGAGTCTCCTCCTACTACTTCGTAGCTGTGTGAAATTGAGGGAG
CTCCAGAAGCCCCTGGAGGCTCTGGACTCATCATCTGAAATGAGGACAGGATACCAACCACAACAGCTGTTGC
AAAGCTAAGTGAAATAGTGTTGCACAATGCCTAGCACAGTGCCCAGCACAAACTAGACACTAGCAAGCACAGG
TTGCCTTGGCCCAAAACTTGGATCACCTTTGCCTCTTCCTTCTCCTTCACTCTTTATGTCTATTTGTTCACTG
TATCTTGTCAATTCCAACTCATAAACATCCCTTTAAGTCATTCCCTCCCTGCAACCCCTCTGCTACTGCCCTA
ACCCAGACCATCTGATGGATCTTTTTGCTTTCAGAGAATAACCTTCCAAAAATACCTTTTGTGGGGCCCATTG
CCTACCTGTATCATAAACTTCAGGTTCTTTACCAAGTCATGCAGGGAATGTCCCAAGCTGGCTTACTCACCTT
CCCAGAGATCCTCCTGCCACCTCCCTGCCCTATCCCATACTATTCCAGGCACCTTTGCACACTCTGTTCAAAC
ACCTGGAATGGCCCTCACACTCCTAAGTTCCTCTCTCCTTCCTTTTATCTGGCCACTTTTGCAGAAGTCAGGT
AATGGCCCCCTGCATCCTCCCCTCTAGAGACCTGGGCTGGGCACTCTCTCCTCTGTGCTTCTGCTGCAACCAT
CACCGACTCCATTAGGACATCCTCACAGCACACAGCATAAGGGCCCGTGTGTCCTTGATAGAAGGTTTGCCTT
CTCCCCAAGGGAAGACACGATATCTAAGCTCATTTTGTATTGCCAGCACTGGCGGGGAAGCACATGCCATGGC
CACTCAACACATGTTTACTACAGTAATGAGGTCTCTGGTTCCTGGGGGACTCCAGCAGTTCAGGATACCCCGC
TAATAAACTGAGTAACACCTTGGGGAAATTGTCAGCTGAGGAGAGTCCTCTATTGATTTTTTTACCTAGCACA
TCCCAGGAAGGCAGAGACTCCTCCTGCCTGTCCAGGGGAGCTCGGGGCTCAGGAGGCTGAAATGTCTGTCTAG
TGGGGGCTTATGGGCTTGGCTAGCCTCTTTTTGTTTTCCCTCATTATAATCCTGCTCATCTGCTTTTTGCTGG
CTAGCCAATCCTTTTTCCTCTAGTTTAAATGAAAGAAGGGAGAGACATTTTCTGTGTTTCTTGTTGTCTACTT
CTTCCCTTCCTCAAAGCCACACAAACATGTCAGGCTCTTACATCACTGTGGCTGAGGTGCAGCCTGGGAAGCA
ATGTAAGAGGGATTTATCAATGGTGTTTAAAAAACTAGAGGAACATGCTGAATGCTTTGGCTGGGAAACAGGT
GAGCTGAGCTTTGCAGGATGTCTGCTCCAGATGCGAAGGGGAAGACCAGGAGCATGGGGTTGTTTCCTGGGGG
AAAAAAGGTGCTGCTTCTCTGAGCTCAACACACGCCCTGACCTAGTCTCCTCCCTGTAACCAGAGCACCCTCT
GGGAAGAGGCTAACTGTGGCTCAGGGGTCAGGTGAGGCCAGGCGAGGGGTGCACCAGTGGCCAGGGTGTGCCT
TGTGCTATTGTTTAGAGGTCTAGTCAAACGAGGCCAGTCTGTGGAGGCTGATTCCATCCTACGGGGCATCCTA
ATAAACCAGTGTGATCTTCAAAGGGTAGACTGGATAGATCTACAGTGTGATCTTCAAAGGGTAGACTGGATAG
ACCTACAGTATAGATCTACAGTATAGATCTACAGTCTACCCTTTGAAGATCACATGGGTTTATTAGGATGCCC
TGTAGGATGGCCTTCTGATGGCCTGCATCAGAATCACCTGGGTGCTTGTTAAAACTATGGACTGAGAACCTGG
GGGAGAGGTGGCGCCTGGGAATCAGCATGTGTGAGGCCCTATCTGTTCCCTGAGCATACAACTGCTTGTGGTT
CAGAAGTTGCCACCAGTTGAGTGGCCATGTATGGCTTGAAATTCAGACTGGAGCCTTGAGTAGGAAAAGAATG
AAAAGAAGAATTTGGCACACAACCCAACTTCTGCCTTTTCTGTACATACAAATATAATATATAACCCACTATG
TACCTAGCAACAAAAGTCAAGTGCTCGGGAATCTAACATTTACAAAATTGGTTTTGCTTTAACACAAACAAAG
ATTTCTTTTTCATTTGTAATTATGGTAAAATACACATAACATAGAATTTATCATCTTAACCATTTTTAAGTGT
ACAGTTCAGTAATGGTAAGTACATTCACACTGTTGTATATTCTGTCTCTGGAACTCTTCTCATCTTGCAAAAT
GAAAACTTTAAACCCATTAAATGACAAGTCTTCACTTCCCCCTTCCCCAGCCCCTGGCAATCGCAATTCTACT
TTCTTTCTCTATGAATTTTACTGCTCTAGGTCCCTCATATAAGTAGAATCATATAATATTTGTCTTTCTGATG
ACTGGCTTATTTCACTTAGTATAGTATACCAGAGACTTTTTAGAATCACTTAGGTGCAAGCAGCTCTCAAATG
ACATTAACTGTTTTGGGTGTCCCTAAAGCAGAAATCTGATTTTTGTTTTTGTTTTTGCCTTGGGCAGTTGTCC
TGGGCTGGTCGTTGGCCCCTGGCTTCCTGAGACCTTGGCCCCTTGCTGAGGGAGAGTGCAGACCTGGCCTTGC
TCTGCCACCTGGGCTCCACTGTCCTGGCCAGCATGTCCTGAGAGACAATAGCCTTGCTGATCTTTTAGAAGTC
TTTAGGTATTTTCCCCTGCACAGTCTCTTCTGAGAACCTTTCTTTTTTTTTTTTTTTATTTCAAAGGAAAAAA
ACCAAAAGCAAAAACATACACTTCCATGACTTAGCTGTTGGCCACAAAAGCCAGAAATCAGTGACTCTCTCTT
CAGTTGAAGATGGTTCCCATGGCAACAAATCTCTCATTTCCTTCAACTAAATGATCTGCTCAGCTTTGGGGTA
AAAGTTCTGTTTTCTCTAGAATTGCCATTTGCAACCTTGTGTGTACATAGGAATCACCTGGAAGTCTTTATAA
AATAATCCCCAAGCCAGGTCCTTTACTTCCCGGAGGATCTGATTCAGCAGGCCTGGGGATAGGGCCTGGTATC
CCTATTTTGAAAGATCTCATTAAGTGGTTCTGTCTCACATGGTTGGGAGTCATTACCCTAAGGCAGGCAGTCT
ATGCCTTGGTGCACGCTAGAGTCGTCTGAAGAGCTTTAAGAAATACTCGTGCGACCCCACCCCTTGACATTCT
GAGTCAGGTGGTCTGAGATGTGACCTGAATATTAGGATTTCACAAATTCTCCAGATGTTTCTAATGTGCAGCC
AGCCTTGAGAACCACTATTCTAGGTCAGCAGTTCTCAAACTGGAGGCTGCCTCAGAATCTCTTGGAGAGCTCC
TTGATTATGGGCCCCGCCCCAGAGTTATTTGGTGAGGCCAGGGTGGAGCATCTCTAACAAGTTCCCAGGTGAT
GCCAATGCTGGTCCAGGGACTGCACTTGGAGGCTCATGGCTCTAGATGATCCTTTAATGAGATTGGCCCTGTT
CTGCTGCCCTGTTCTTTTTCCTGGTTGGGGGTTGGTGGACCCTTCCTTCCCTCAGTCTGACTCAGGCGTGAGA
CTTCTTAAAGGTACCAGCTTTTCTTTTTCTGAACATTTTAGCATTCAGATAAATATTATGACATATTTTTAAA
GCAAAGTAACATAGATTTCTTCTCCCGGGGCTAGGAGCCTCAGAGTCTGCCTGAATTAAGAATTTATCTGTGC
CTAAGATTAGGATGCATTTAGTGATCTGAGCTAAGGGGTTGGTGGATCTGCAGCAATAGGTTCAGCCTGTGCC
TGGGTGAGGGTCACCTTGTGACCGGCGCTGGGTAGGATCTGAGTACCACACACTTGGCCCTCTAGCATGGGGA
GGACCTGTCTGGTCCACCTGGGGGAAAGCCTGGTTTTCTGATGCAGACCCAGCCCTCTGCCCACCTCCACATC
TGTGCACAAACATGGAAGGTAGCAATGAGGAAACACAGCACCAGGACTGCCGTGAGCCCAGGAGCTAGGGTTA
GAGCCTCACTTCTTTATGCATTTCCTTTTCTATCATACTTTGGAACAGGCTTGAGCTGAAACCAGAGAGTTAG
TACCTGGTTTCTGCCTCAATCTAGTCTCCCTCCTCCAAAGATGCCCCCACAACGTGGGCAACTTCAACCCCCA
TGAGAGCTCAGAATTCCACATTCAGCGACAAAGTTGACAAGAGCCTCTGGAGATCTCAAAGACTTATTAAAAG
TGGAAATGGCTACTGTTTTACTGAGGCAGGGTGAAAACACAACTCACTTCCTAGGATCGAACCCAGCAAATTC
ACTCAGCCCCCAGGTAACTGAGGACTCAGTTGAAGGAAAATAATTTTGAGCCCCTGAAAATAGATGCTATAAA
GCTGTGTATCAAGGGCCAACCATTTTGCTAATATCACATATCTCACGGCATTTGCTTTGATTTTAAATTCAGT
TCTAGTGAACTTGGTTCTGATTTCTAATGACAAAGCAAACTAAGAGAATGATGACATGTGCTAGATAAAGCAA
GAAGTGGCAGCTAATAGCCTAAATTGTGATGGCATTAAGAAGACCAAAACTAGTTTACTTGTTCAACGACAGC
TTGTCTTTGGAAAAAAAAAAACACTACATTAAGGATAAGAAAATATGTCCAGGCATGGTGGCTCACATCTGTA
ATCCCAGCATTTTGGGAGGCTGAGGCGGGAGATCGCTTGAGCTCAAGAGTTGACGACCAACCTGGGCAACATG
GCAAAACCCTGTCTCAATAAAGAATACAAAAGCACACCTGTAGTCAGTCCCAGCTACTCAAGAGGTTGAGGTG
GGAGACTGGCTTGAGCCCAGGAGGCAGAGGTTGCAGTGAGCTGAGATCATACCACTACACTCCAGCCTGGGTG
ACAGAGCCAGACCCTGTCTCAAAATAATAATTAAAAAAGACCAAAACTAAATACATATCTCAGGAACCATCAA
GTAGCCTGAGGTCGTTGGTCGTTTAGTGGGGAAGAGAGGGAGAATATGTTATAATAACCCCGGGAGCAACACA
GCATTTCAGCTCAGTTCACCCTGTGACATCCAGGACATGCAGAGGTAAAAAAGCGTTCCAACAATGTTCAATA
CACTGTCTAAGAAGGCAGGGCTGCGTTTTATCCACTTTAGAATTATTTCCATCCCCAAACAGTTAAAATACTT
TCACAAAAGTCTTGGTGCTTAAAAGATAAATGCTCAGTGACCTGGAAGTTCACATAAATGAAACGGTTGATGA
TCTGATGATGAAGGATAGGCGAGATGGGTAAACTCACTCTTTTTTTTTTTTTGAGATGGAGTCTCACTCTGTC
ACCCAGGCTGGAGTGCAGTGGCATGATCTCGGCTCACGGCAACCTCCGCCTCCCAGGTTCAAGTGATTCTCCT
GCCTCAGCCTCCCAAGTAGCTGGGATTACAGGCGCCCACCACTTTGCCCAGCTAATTTTTGGTATTTTTAGTA
GAGACGGGGCCACCATTTTGGCCAGGCTGGTTGTGAACTCCTGACCTCGTGATTCGCCCACCTCCTCCTCCCA
AAGTGCTGGGATTATAGGTGTGGGCCACCGTGCCCGGCCAAACTCACTCTTTTGAACTTAACATTTTCCCCCT
GACATTGGAGACTCTCCTGCTACCTCTCTCCTAAGAAAAAAGGGCAGGTGGTGGGGGGACAAGCCCCTTCCAC
CTTCCCATCTCCAAGGGACTTTGCAGTGTGGGTGATGGTGTGGCTGATCATCCTCTTTCTGCACCTCTGATTC
TGCTTGTGTTGTCCTTATTGTGTGGGGCAGGAGGGTCAGGACTTCAGCTAGGGGTGTGCTGGCTCTGCAGTGA
CTCAGGCCTGGGTGTTTTTTGGTGAATTTAAAAAGATGACCATTTCTGGGGGAAAGTGACACTTTTACTTTCT
CCACACCTTCACCATCCATTTTCTTACTGGACTTCGCTGCGTTCCTGCAAGGAGGACAGGGCAGAGAGTAGCA
ACCCTCCTTGCCGAGGCCCAGAAAGATAGCGTGGTGTGCCCAGGGCACCCATGGTGGGTGATGGACATCTCCT
TTTGGGTGCCAAGGCTTCCTCAAGGTGGGAGGAACTGGAGGGCAGGGGACGGTGGCCAGTGTCCCGCTCTAGC
CCTCTAGGGCACCTTTTTCTCCCCTCTGAAGTTGTTAGGCTGATCTGGAGTCTGCTCCAGGCCTGGGCTTCAC
CCTGGCCTCATGCCCTGCCCAGCACCTGTGTGGAGGGACCTGTTCGTATTCATTCCTCTTTGGGGGCCAAGCT
CAGGGCACCCGAACCAGCAGCCTTGGGTGGCTGAACCTAGTGGGACAGAAGGGAGGCAGTTGTATCTGGCAGA
GTCACCCAAGGCCACAGGCCTGAGCAAAGCAGGAGAGCGGGGCAAGCTGGGGTCAGGGACCATGGTGCTGGCC
CCCTGCTGCTCTGGCCATGTGGGAGGCAGCTGGAGGGGTCCCAAGTGGCAGCTCCTGCCAGACTACCCCGGAC
TCCCGAGCCCATCGTCCTGTACTCTTCTCCAGTGGGACGTCTGGCCCTCACTGTGGCTAGCTTCTGGGCAAGT
CCCTCTGCTCAAGATCACTTTATGGGGCAGCTGGTGCCCCCTGGGGCTCCCACACTCTGCACATACAATTTAG
GGACCTGGCAGGGTCTTGGTGGCCTGCAGCTTCCCTTTCTGGAACCGACTCGCCTCCCATCAGAGAGCCATAA
CTCTTCTTCAATACAGTATTGTTTGAACTTTGAAATATATGCATTTGTCTATGTATTTTCTTAAAAATTAACA
CTGTATCTCAATAAGCATACAATGGATTGTTCAATGGTACAGTTTGGAACCAATCCCCCGCCACTTCCCTCCC
CAAGTAAAGCCAGGACAGATGCTGGAGTCAGCATGGGAGCTGTGGAAACCTTTTGCCCTGGAGCCAGGTGCCT
GTGGCTGTGCCTGGGAGTGGCTTCAGCCCAGGCGTGGTGTCAGTTTCCTGGCACCCCTGCCCAGGAGCCTGCA
TGAAGGCAGCCGGGTCTCTCTCTGAGTGGCTGGTGCACCGGCTCATTTCTGAGTGGCCTCCTGCGTATGAAGA
AAAAGCGGCCACGTGGCATGCCTCCCTTCCCTCCCTTGCTTTCCTCTCAAAGAGCCAAGTCACGCTGCACTGC
GCTCCGTGGAGCCTTTCCCGATGGAGAAGAGAAGGGAGGCCTGAGATGTCCTTTGCTGGGATGTGGAGAAACA
CCATCTATATGAAAAGCCCCTTGCTTGCTCTGCTGATTTTCTCCCTCCCCTGGCCCTGGAGAGAAAGGCTGTG
CCATTCAAAGACAGTTTGGGGACATGGGGGCTGCAGGCCTGATCTTATTTTTATGCAAATTTTGTTCTGGGAG
CAGTGGTTTATACAAACTCCTGTAGCATAATTCCAGCTTGTGTGTGGCTGTCCTTGAGTAGTGATTCTGAAGT
GATGACTGTGATGCTATGCCTAAAAACATCATCAGGGTACTTTGTATCTGTCACTGTGTTTGAACGGCCCTCA
ATTTCTATCTAATAAAACCAGTCAAATGGTTCACCTA
  (SEQ ID NO: 197)
MRYADPSANRDLLGSRTLLFIFICAFALVTLLQQILYGRNYIKRGLQFGWQSGDQLTNWTGLENVTDDPAVQS
GSDSSSRYFEFYEGPFEYNSTRCLELRHEILEVKVLSMVKQSELFDRWKSLQMCKWAMNISEANQFKSTLSRC
CNAPAFLFTTQKNTPLGTKLKYEVDTSGIYHINQEIFRMFPKDMPYYRSQFKKCAVVGNGGILKNSRCGREIN
SADFVFRCNLPPISEKYTMDVGVKTDVVTVNPSIITERFHKLEKWRRPFYRVLQVYENASVLLPAFYNTRNTD
VSIRVKYVLDDFESPQAVYYFHPQYLVNVSRYWLSLGVRAKRISTGLILVTAALELCEEVHLFGFWAFPMNPS
GLYITHHYYDNVKPRPGFHAMPSEIFNFLHLHSRGILRVHTGTCSCC*
```

[0159] An amino acid sequence for the protein encoded by the TNIP1 gene that is a regulator of T cell exhaustion/dysfunction resistance is available from the UniPROT database at accession no. Q15025, cDNA NM_001252385, with gene location at Chr 5: 151029945-151093577.

```
  (SEQ ID NO: 198)
AGTCTCCGGGGACTTTCCCAGGGGTGGGGCGGCCCGGCCAGGCCCCCGGCACTTCCTCGTCCTCGGCCCGGGT
GCCCTGCCCCCGTCCAGGAGCCCTAGGAGTGCTACGGGGGGCCGGAGCCTTGCCCGGGCCGCTGCCCCGTCCC
TGGATTCGGGGCTGGACGCAGCAAGCGGGGCGCTGTGTCCCCAAGCTCCCCGTCCTCGGCCAGGCGGGCACCA
CGGCAGGGGCTGAGCTACCCTCATGGAAGGGAGAGGACCGTACCGGATCTACGACCCTGGGGGCAGCGTGCCC
TCAGGAGAGGCATCCGCAGCTTTTGAGCGCCTAGTGAAGGAGAATTCCCGGCTGAAGGAAAAAATGCAAGGGA
TAAAGATGTTAGGGGAGCTTTTGGAAGAGTCCCAGATGGAAGCGACCAGGCTCCGGCAGAAGGCAGAGGAGCT
AGTGAAGGACAACGAGCTGCTCCCACCACCTTCTCCCTCCTTGGGCTCCTTCGACCCCCTGGCTGAGCTCACA
GGAAAGGACTCAAATGTCACAGCATCTCCCACAGCCCCTGCATGCCCCAGTGACAAGCCAGCACCAGTCCAGA
AGCCTCCATCCAGTGGCACCTCCTCTGAATTTGAAGTGGTCACTCCTGAGGAGCAGAATTCACCAGAGAGCAG
CAGCCATGCCAATGCGATGGCGCTGGGCCCCCTGCCCCGTGAGGACGGCAACCTGATGCTGCACCTGCAGCGC
CTGGAGACCACGCTGAGTGTGTGTGCCGAGGAGCCGGACCACGGCCAGCTCTTCACCCACCTGGGCCGCATGG
CCCTGGAGTTCAACCGACTGGCATCCAAGGTGCACAAGAATGAGCAGCGCACCTCCATTCTGCAGACCCTGTG
TGAGCAGCTTCGGAAGGAGAACGAGGCTCTGAAGGCCAAGTTGGATAAGGGCCTGGAACAGCGGGATCAGGCT
GCCGAGAGGCTGCGGGAGGAAAATTTGGAGCTCAAGAAGTTGTTGATGAGCAATGGCAACAAAGAGGGTGCGT
CTGGGCGGCCAGGCTCACCGAAGATGGAAGGGACAGGCAAGAAGGCAGTGGCTGGACAGCAGCAGGCTAGTGT
GACGGCAGGTAAGGTCCCAGAGGTGGTGGCCTTGGGCGCAGCCGAGAAGAAGGTGAAGATGCTGGAGCAGCAG
CGCAGTGAGCTGCTGGAAGTGAACAAGCAGTGGGACCAGCATTTCCGGTCCATGAAGCAGCAGTATGAGCAGA
AGATCACTGAGCTGCGTCAGAAGCTGGCTGATTTGCAGAAGCAGGTGACTGACCTGGAGGCCGAGCGGGAGCA
GAAGCAGCGTGACTTTGACCGCAAGCTCCTCCTGGCCAAGTCCAAGATTGAAATGGAGGAGACCGACAAGGAG
CAGCTGACAGCAGAGGCCAAGGAGCTGCGCCAAAAGGTCAAGTACCTGCAGGATCAGCTGAGCCCACTCACCC
GACAGCGTGAGTACCAGGAAAAGGAGATCCAGCGGCTCAACAAGGCCCTGGAGGAAGCACTGAGCATCCAAAC
CCCGCCATCATCTCCACCAACAGCATTTGGGAGCCCAGAAGGAGCAGGGGCCCTCCTAAGGAAACAGGAGCTG
GTCACGCAGAATGAGTTGCTGAAACAGCAGGTGAAGATCTTCGAGGAGGACTTCCAGAGGGAGCGCAGTGATC
GTGAGCGCATGAATGAGGAGAAGGAAGAGCTGAAGAAGCAAGTGGAGAAGCTGCAGGCCCAGGTCACCCTGTC
AAATGCCCAGCTAAAAGCATTCAAAGATGAGGAGAAGGCAAGAGAAGCCCTCAGACAGCAGAAGAGGAAAGCA
AAGGCCTCAGGAGAGCGTTACCATGTGGAGCCCCACCCAGAACATCTCTGCGGGGCCTACCCCTACGCCTACC
CGCCCATGCCAGCCATGGTGCCACACCATGGCTTCGAGGACTGGTCCCAGATCCGCTACCCCCCTCCCCCCAT
GGCCATGGAGCACCCGCCCCCACTCCCCAACTCGCGCCTCTTCCATCTGCACCAGTTTTGTCGCAGCCGGAAT
ACACCTGGCGTCTACCCTGTGGAGGGGTTCGAAATCCAAATCAGAGCTCCCAAGTGATGGACCCTCCCACAGC
CAGGCCTACAGAACCAGAGTCTCCAAAAAATGACCGTGAGGGGCCTCAGTGAGACCAGATTGTGTCATTTGGC
TCCACCTTCATCTTGCAGAGCCAGCTGATCTCAGATTGCCAAGAAACTAGAAGCCACTTGCACGGTGTGGCCA
GAGCCTCAGCTGGATGAGAGGCTGAGATGGGTGGCCAGCTTGTACACCAGTCCCTGAACTGAGCTGTTTACAG
GACTGGGGAGGCTCCACCCAGAAGGCTTTCATTTGTACTCTGCTGGGAGTGACTGGGAAAAACTCCTTCCCTG
CTGCTGAGTGGAGAGAGGCCTCATCCGGCTTTGACCCACCATCCGTTGCAGAAGCCTCCAGGAGCAGCAATCC
TAAGAGTGGGAGGCAGCCAAGACCCCCTTCCTTCAAAACCTCCCGGAAGTGGTTTCAGGCCCTCTAGTTGCCA
TGACCAATTTGTGTGTGTGTTTAATTTTTGCTTCAAGCTCTGTAGCAGGACCTGCCCCACGCACACCCCTACC
CCTCTGTGAGGAGCTGTGGGAAGTGTGGGTTTGTCTCCAGAACAGAAGAGAATGATGGATATTCTGGCTCTGG
GGCCCTCTCCACCACCACTCACAGTAGCCTTGCTGAAGCCATCACAGATGGGAGAAGGCCATGCCAGCCACGT
CCGCCGAGGGGCGCCAGCCTGAAGCTGCCAGGCCCTGAGGTTCAGACCCTGGACCCCATAGCTGGAGGCCTGT
GGTGCCAGAAGCCCAGATTAGGGTGGCTGTCCATCCCTGGATAGCTATTTGCACGAATCATGGACATAAATCC
AAGTTGAAGAAGATC
  (SEQ ID NO: 199)
MEGRGPYRIYDPGGSVPSGEASAAFERLVKENSRLKEKMQGIKMLGELLEESQMEATRLRQKAEELVKDNELL
PPPSPSLGSFDPLAELTGKDSNVTASPTAPACPSDKPAPVQKPPSSGTSSEFEVVTPEEQNSPESSSHANAMA
LGPLPREDGNLMLHLQRLETTLSVCAEEPDHGQLFTHLGRMALEFNRLASKVHKNEQRTSILQTLCEQLRKEN
EALKAKLDKGLEQRDQAAERLREENLELKKLLMSNGNKEGASGRPGSPKMEGTGKKAVAGQQQASVTAGKVPE
VVALGAAEKKVKMLEQQRSELLEVNKQWDQHFRSMKQQYEQKITELRQKLADLQKQVTDLEAEREQKQRDEDR
KLLLAKSKIEMEETDKEQLTAEAKELRQKVKYLQDQLSPLTRQREYQEKEIQRLNKALEEALSIQTPPSSPPT
AFGSPEGAGALLRKQELVTQNELLKQQVKIFEEDFQRERSDRERMNEEKEELKKQVEKLQAQVTLSNAQLKAF
KDEEKAREALRQQKRKAKASGERYHVEPHPEHLCGAYPYAYPPMPAMVPHHGFEDWSQIRYPPPPMAMEHPPP
LPNSRLFHLPEYTWRLPCGGVRNPNQSSQVMDPPTARPTEPESPKNDREGPQ*
```

[0160] An amino acid sequence for the protein encoded by the TRIM56 gene that is a regulator of T cell exhaustion/dysfunction resistance is available from the UniPROT database at accession no. Q9BRZ2, cDNA NM 030961, with gene location at Chr 7: 101085481-101097967.

```
  (SEQ ID NO: 200)
AGTTTTGTTTCTTTTCCAGGCACCCAGCAACGGCGGCCTCCAGGCCTCAGGCCCCCTCACCATCCTAGAGGTC
AAGATCAGCTCTGGCTAGTTCTCACAGGTCTGACCCAACAAGTAGCACTGACATTTTTACGTTTGCTGGATGT
ACACACGGAAGTGGAGGAGGAGGAGGAGAAGGAGGAGGGCAGCTCCTTAGCTCAAGAGCAAGTGGCCCAAGGC
CTCAGAAGACTAGAAGGAAGTTCCTGGCCATTCAGCATGGTTTCCCACGGGTCCTCGCCCTCCCTCCTGGAGG
CCCTGAGCAGCGACTTCCTGGCCTGTAAAATCTGCCTGGAGCAGCTGCGGGCACCCAAGACACTGCCCTGCCT
GCATACCTACTGCCAAGACTGCCTGGCACAGCTGGCGGATGGCGGCCGCGTCCGCTGCCCCGAGTGCCGCGAG
ACAGTGCCTGTGCCGCCCGAGGGTGTGGCCTCCTTCAAGACCAACTTCTTCGTCAATGGGCTGCTGGACCTGG
TGAAGGCCCGGGCCTGTGGAGACCTGCGTGCCGGGAAGCCAGCCTGTGCCCTGTGTCCCCTGGTGGGTGGCAC
CAGCACCGGGGGGCCGGCCACGGCCCGGTGCCTGGACTGTGCCGATGACTTGTGCCAGGCCTGTGCCGACGGG
CACCGCTGCACCCGCCAGACCCACACCCACCGCGTGGTGGACCTGGTGGGCTACAGGGCCGGGTGGTATGATG
AGGAGGCCCGGGAGCGCCAAGCGGCCCAGTGTCCCCAGCACCCCGGGGAGGCACTGCGCTTCCTGTGCCAGCC
CTGCTCACAGTTGCTGTGCAGAGAGTGCCGCCTAGACCCCCACCTGGACCACCCCTGCCTGCCTCTGGCTGAA
GCTGTGCGTGCCCGGAGGCCGGGCCTGGAGGGACTGCTGGCCGGTGTGGACAATAACCTGGTGGAGCTGGAGG
CAGCGCGGAGGGTGGAGAAGGAGGCGCTAGCCCGGCTGCGGGAGCAGGCGGCCCGGGTGGGGACTCAGGTGGA
GGAGGCGGCTGAGGGCGTCCTCCGGGCCCTGCTGGCCCAGAAGCAGGAGGTGCTGGGGCAGCTACGAGCCCAC
GTGGAGGCTGCCGAAGAAGCTGCTCGGGAGAGGCTGGCGGAGCTTGAGGGCCGGGAGCAGGTGGCCAGGGCCG
CAGCCGCCTTCGCCCGCCGGGTACTCAGCCTGGGGCGAGAGGCCGAGATCCTCTCCCTGGAAGGGGCGATCGC
ACAGCGGCTCAGGCAGCTGCAGGGCTGCCCCTGGGCACCAGGCCCGGCCCCCTGCCTGCTCCCACAGCTGGAG
CTCCATCCTGGGCTCCTGGACAAGAACTGCCACCTTCTTCGGCTGTCCTTTGAGGAGCAGCAGCCCCAGAAGG
ATGGTGGGAAAGACGGAGCTGGTACCCAGGGAGGTGAGGAGAGCCAGAGCCGGAGGGAGGATGAGCCGAAGAC
TGAGAGACAGGGTGGAGTCCAGCCCCAGGCTGGAGATGGAGCCCAGACCCCAAAAGAGGAAAAAGCCCAGACA
ACCCGAGAAGAGGGAGCCCAGACCTTGGAGGAGGACAGGGCCCAGACACCCCACGAGGATGGAGGACCCCAGC
CCCACAGGGGTGGCAGACCCAACAAGAAGAAAAAGTTCAAAGGCAGGCTCAAGTCAATTTCCCGGGAGCCCAG
CCCAGCCCTGGGGCCGAATCTGGACGGCTCTGGCCTCCTCCCCAGACCCATCTTTTACTGCAGTTTCCCCACG
CGGATGCCTGGAGACAAGCGGTCCCCCCGGATCACCGGGCTCTGTCCCTTCGGTCCCCGGGAGATCCTGGTGG
CGGATGAGCAGAACCGGGCACTGAAACGCTTCTCCCTCAACGGCGACTACAAGGGCACCGTGCCGGTCCCTGA
GGGCTGCTCCCCTTGCAGCGTGGCCGCCCTGCAGAGCGCGGTGGCCTTCTCCGCTAGCGCACGGCTCTATCTC
ATCAACCCCAACGGCGAAGTGCAGTGGCGCAGGGCCCTGAGCCTCTCCCAGGCCAGCCACGCGGTGGCGGCAC
TGCCTAGCGGGGACCGCGTGGCTGTCAGCGTGGCGGGCCACGTGGAGGTGTACAATATGGAAGGCAGCCTGGC
CACCCGGTTCATTCCTGGAGGCAAGGCCAGCCGGGGCCTGCGGGCGCTGGTGTTTCTGACCACCAGCCCCCAG
GGGCATTTCGTGGGGTCGGACTGGCAGCAGAATAGTGTGGTAATCTGTGATGGGCTGGGCCAGGTGGTTGGGG
AGTACAAGGGGCCAGGCCTGCATGGCTGCCAGCCGGGCTCCGTGTCTGTGGATAAGAAGGGCTACATCTTTCT
GACCCTTCGAGAAGTCAACAAGGTGGTGATCCTGGACCCGAAGGGGTCCCTCCTTGGAGACTTCCTGACAGCC
TACCACGGCCTGGAAAAGCCCCGGGTTACCACCATGGTGGATGGCAGGTACCTGGTCGTGTCCCTCAGTAACG
GGACCATCCACATCTTTCGGGTCCGTTCTCCGGACAGTTAAAGGGGCTAGGACTAGGGTGAGAGGGAGTGGGG
AGGGAGAGGGCAGGAAGGAGGCAGAGCTGTCCGTGGGAGGTGGAGGCCGAGGACATTTTCCTGAAGGGCAGGG
GTTGGCAACTTTTCAACATGGAGTGCCAAACTGCTAACCCGTCTTCTAGTGTGTGAGAATAGGGACCAAGGTG
GTGGCGTGACCTTAACTCTCAGAAGCAGAGGAGGCAGGTGGGTGGAGGGGGATGCTGGGAGTTCACCTGCCTC
TTGCTTTTTGTGGGTGGCTGCTGCCACCACCGCCGCTGCTATATAGTTTAGGTTTCTGAGGTTTGTGAGCCTG
TCCTGCTTTGCATTCTTCAAAACCATTCCTGATAGAGTAGCCGAGGGAGAGTCTTGGGGCCAAGAAGGGCCCA
GGGTGGGTCAGGCGTGTGCACTGTGGAACAGAGCTGAGACCCCGGCCCCCCTTGGACTGGCACAGGGTCCTAC
AGAGTCAGAGGAGGCCTGAGATTTCGAATGGGCAGTGAATGGCCTCTTCTGCCAGCCACAGGCAGGATGCTCC
TTGATCACGGCATCCCCCGGCGGTAGTACAGGGTGAGCTTGCAGGAGGGTCTGCAAGTGCAGACAGCAGCTGG
GGCCAAAGAGGTGTTAGGTTCAAAGGCTGCGAAGAGAATAGGCTACTGGAAAACCAAACCCAACAGAATTCAC
GTCCAAAAATCCACATTCTCCATCGCTTCTCAGCCTTTTGGCTAAGATTAAGTATTAAAAAAAAACCAGGCTC
TGCCAGGCGCAGTGGCTCATGCCTATAATCCCGGCACTTTGGGAGTCTGTGGCAGGAGGATTGCTTGAGGCCA
GGAGTTTGAGACCAGCCTGGGCAACATAGCGAGACCCCATCTCTACAAAAGATTAAAAATTAGCTGCGTGTAG
TAGCATATGCCTTTCAACGTAGCTACTCAGGAGGCTGAGGTGGGAGGATCCCTTGAGCCGAGGAGTTTGAGTC
TGCAGTGAGCTATGATCGCACCACTGCATTCCAGACCCCATCTCGAAAAAAAAAAAAAAAAAAAAAAACAGAA
ACAACAGAAAAAGCAGGTTATCCATCACTTCTCAGCTAAGATCAAGTGTTAAAATAAATAAATAAATAAATAA
ATAAATAAATAAATAAATACCAAGTTATGAGTGTCAGAGCAGGGGAGCCCTCCACGCAGCCACGGAGCCAGTC
TGAGGGAAGAGGTACATAGGATAGAAAAATCTCTAGGCTCCAACGCTTCTGCTTCGGTGTCTTTCCATTTCCC
AGGGTCTATGTGTTGCCTTCTCTTCATTTTCCAGCAAAATTCCTTTTGAGATATGTTGGCCTTCACTCGGCTG
AACTAGGGGGTGAAGGAAGGTTGTCCTCTGTGGGCCACTATTGCTGGGGAAACAGCTAAACCCTGCAGGCCAA
GTGGAACTTGGAGGTGCCAAGAAAACCTAGAAGGTGCAATGGGGCTGCGACGGATAGAGGTGTCAAACCAGAA
GGGAGGAACCCGTCGGAGGTGGGCTGTGACCACCGGACCTTTTCATAAGTGGTGGCAGTGGTAGAATTGAGGG
GGCAAGTAGGCTTGGAGAATGTTTTTAGCCAGGGGCTGTTGAGAGATGGCAGAAGGGGGTCTTAATGTGGGGA
CTGTGGACAGTGGGGCATTCGTGGGAACCAGAGGGATTTTGGACAAGTCCAGATGGAATGTGCAGGGCATAGG
TAGAGGGAAAAGAAAATCCCTTTCTGGGAAAACCATTTCTTGTTTATTGAAACAATGCAGGACATCATCAAAG
TCCGGGTGGACACATTCCATTATCTACAAATTACAAAGGTAGGCACAGCAAAGAATAATGAAGATTATAAGAA
AACCAAGCGCCAGGCACGGTGACTCAAGCCTGTAATCCCAGCACTCTGGGAGGCTGGGGTGGGTGGATCACTC
AAGGTCAGGAGTTCGAGACCAGCCTGGCCAACATGGAGAAACCCCATCTCTACTAAAAATACAAAAATTAGCT
AGGCGTGGGAGCGGGCGTCTGTAATCCCAGCTACTTGGGAGGCTGAGGCAGGAGAATCATTTGAACCCAGGAG
GTGGAAGTTGCAGTGAGCTCAGATCGCACCATTGCACTCCAGCCTGGGTAACAAGAATGAAACTCCATCTCAA
AAAAAAAGAAAAAGAAAAGAAAGAAAACCAAGGTCCCTCTCCCTCTCCCTCTCCCCACGGTCTCCCTCTGCCT
CTCTTTCCATGGTCACGGTCTCCCTCTGATGCCGAGCCGAAGCTGGACTGTACTGCTGCCATCTCGGCTCACT
GCAACCTCCCTGCCTGATTCTCCTGCCTCAGCCTGCCGAGTGCCTGCGATTGCAGGCGCGCGCCGCCACGCCT
GACTGGTTTTCGTATTTTTTTGGTGGAGACGGGGTTTCACTGTGTTGGCCGGGCTGGTCTCCAGCTCCTAACC
GCGAGTGATCCGCCAGCCTCGGCCTCCGGAGGTGCCGGGATTGCAGACGGAGTCTCGTTCACTCGGTGCTCAA
TGTTGCCCAGGCTGGAGTGCAGTGTCGTGATCTCGGCTAGCTACAACCTCCACCTCCCAGCCGCCCGCCTTGG
CCTCCCAAAGTGCCGAGATTACAGCCTCTGCCCGGCCGCCACCCCCTCTGGGAAGTGCGGAGTGTCTCTGCCT
GGCCGCCCATTGTCTGGGATGTGAGGAGCCCCTCTGCCCGGCTGCCCAGTCTGGGAAGTGAGGAGCGCCTCTT
CCTGGCCGCCATCCCATCTAGGAAGTGAGGAGTGTCTCTGCCCGGCTGCCCATCATCTGAGATGTGGGGAGCA
CCTCAGCCCCGCCGCCCCGTCTGGGATGTGAGGAGCGCCTCTGCCCGGCCGCGACCCAGTCTGGGAGGTGAGG
AGCGTCTCTGCCCAGCCGCCCCGTCTGAGAAGTGAGGAGCCCCTCCGCCTGGCAGCCGCCCCGTCTGAGAAGT
GAGGAGCCCCTCCGCCCGGCAGCCGCCCCGTCCGGGAGGGAGGTGGGGGGTCAGCCCCCTCCCGGCCAGCCGC
GCCGTCCGGGAGGGAGGTGGGGGGTCAGCCCCCGCCCGGCCAGCCGCGCCTTCCGGGAGGGAGGTGGGGGATC
AGTCCCCGCCCGGCCAGCCGCCCCGCCCGGGAGCGAGGTGGGGGGCGCCTCCGCCCGGCCGCTGTCCCGTCCG
GGAGGTGGGGGGTCGCCTCTGCCCGGCCGCCCCGTCTGGGAGGTGAGGAGCCCCTCTGCCCGGCCACCACCCC
GTCTGGGAGGTGTACCCAACAGCTCATTGAGAACGGGCCATGATGACGATGGCGGTTTTGTGGAATAGAAAAG
GGGGAAAGGTGGGGAAAAGATAGAGAAATCAGATTGTTGCCGTGTCTGTGTAGAAAGAAGTAGACATGGGAGA
CTTCATTTTGTTCTGTACTAAGAAAAATTCTTCTGCCTTGGGATGCTGTTAATCTAAGACCTTACCCCCAACC
CCGTGCTCTCTGAAATATGTGCTGTGTCCACTCAGGGTTAAATGGATTAAGGGCGGTGCAAGATGTGCTTTGT
TAAACAGATGCTTGAAGGCAGCATGCTCCTTAAGAGTCATCACCACTCCCTAATCTCAAGTACCCAGGGACAC
AAACACTGCGGAAGGCCGCAGGGTCGTCTGCCTAGGAAAACCAGAGACCTTTGTTCACTTGTTTATCTGCTGA
CCTTCCCTCCACTATTGTCCTATGACCCTGCCAAATCCCCCTCTGCGAGAAACACCCAAGAATGATCAATAAA
AAATTAAAAAAAAAAAAAAAAAAAGAAAACCAAGAAGATGGGAAAACCATGCAGAATTGATTTGACGAGGAAA
GCCTTGGTCTCTAATACATGCAATGACTAGAACAGTATTTGGTCAAAGAACCACATAAGCTCTGTACCCTGGA
GGAAATGTATGCAGGCAAGGACTAGTAAAATAAAAAATAATAATAATTAAAAAAAAAAAAAAGAAAGGCTGGA
CGCGGTGGCTCACACCTGTAATCCCAGCACTTTGGGAGGCTGAGGTGGGTGGATCACCTGAGGTCAGGAGTTT
GAGACCAGCCTGGCCACTACGGTGAAACCCCATCTCTACTAAAAATACAAAAATTACCCGGGTGTGGTGGCGC
ATGCCTGTAATCCCAGCTACTGGGGAGTCTGAGGCAGGAGACTCGCTTGAACCTGGGAGGCAGAGGGTGCAGC
GAGCCGAGTTCACCCCATTGCACTCCAGCCTGGGTGTCACAGTGAGACTCTGTCTCAAAAAAATAATAAATAA
ATAATTAAATCCACTTGCAGTGGTCAAAAATAAATGTTAAATAAATGGGTGAGAAATCTTGCGGAGAAATAGA
CTCCTGGCACTATAAAAATGATCCTGGAGAATAATTTGGCTAGACTTTGCAAGAATGACAAAAATGATTATAA
GAATCAGTTGTCTCACTTTGGGGAATACATTCTGGGAAAATAATGTAAGAGAAAAAATATTTGCATACAGACA
TTTGAGGCTGCTCTGTATATTACAGGCAAGAACTGGAAACTGTTCGGCTGCAGGGTGACAGCTAACTAGATTG
TGGTTTATTAGGGGAATGAGCCTTTCTTTGTGTATGACAACTATGAAAACTATTGAGAAGAAATAGTTACGTG
ATACAGTCATAATCCTCAAAAACGGAGAATCAGGAATTATGATCAAATAGTGATAGTAACAAGGAAAACATCT
GTCTAAATAATTACTGAGTAGAAATAGGTTCGGAATTTGTAAATAGTCATTAATTTGGGAGATTGGGGTTTTT
TTTGTTTTGTTTTTTGTTTGTTTTTCATTATTTTGTGCTATTATTCATACGTGTACATTTCTACTTCAGTTTT
TATTATCCATTACATAACATACATGCTTGATTATTTGCTTCAAGGAAATACACCTTTATAAGTAATACTCAAT
AACTACTGGGTTTGAGAATGAAGGTGTCAGAACGAATGAGATTGTCCTATGAAAGAAGAGGCAGGAGCCAGGG
AGGAGGATCCCACCCGGCCGGGGCTCAGCCAGGAGGCAGGGCCATTGGGGCAGGGTGGCAGTCCAAGGAACCG
CTCTGGGAAGGTTTGCAAAGGTCGGGGTCCCCCCTGCCAGGTGATCGAATTATCGTGGAGTGTCTGGAAGGCG
GGGGAAGTTTTGTTGAGTTCACCAAATAACTCAGACCAACTGGAAACCAAGTGGAGTTTCTACAGGACCAACT
AGAATAGGGATCAGCTACATGGGGGGGGGGGGAGGGGGGCAGGGAACGGTGTCTGTCTTCATTGCAGCTCTGT
CTGCAGAGCCAGCACTGTGATACCTCATAGTAGGTGCTCAGTGAATGTCTGTGAAGTGAATTACTATCTAGAC
AAGGATGAGACTGGTATGACTCTCCAAAGCTTTCCCACCTCCAAAACCTCGGCTTGTGGGGAATCTCCAGTAG
GGGGCACTGTGGACACGGTTCGCATCTGCCTCCCAAGGCTGGGCTCCGCGTCAAAAAAAAAAAAAAAAAATGA
GACTGAGCCAGGTGCAGTGGTCACTCCTGTTATCTCAGCACTTTGCGTGGCCAAGGCGGGAGGATGTCTTGAG
GCCAGGAGTTCAAGACTAGGCTGGGCAACATAGCAAGACCCCATCTCTACAAAAAAATTTTTAAATTAGCCAG
AGGTGGTGGCATGCACCCGTAGTCCCAGCTGCTCGGGAGGCTGAGGCAGAAGATTGCTCGAGCCCAGGAGTTC
AAGGCTGCAGTGAGCTCTGATTGTGCCACTGCACTCCAGCCTGAGTGACAGAGCAAAACCTGGTTTCCTAAGG
GGGGGATAAAAGAGGGAGAGATGAGATCGGGGTGTCCCGCTTCTGTGCATGTGGAGGGGGTAACTGGGAACCG
TGTACTGTAGGGGATCGCACACCTTGGGGTGGAAACAGCAGCTCTCCGGAGTTGCATGGGAGCCATGGGCAGT
GGTCCTGGCTGGTGAAATGATTCTAGCCACGTGGCCCACCCAGGGGGCAAAACAATAGAAACCTTCAGAAATG
AAACGTCACCTGGCTGCAAGAAGATAGTCCCACAGGCGCCCTAGAGATGGGGATGCCAAGTGGCTTCTCGGGA
AGCTGTAAGAATCCACAGGGCATTGTAAGATGGAGGGAAATATTAAGTTTTCTTCGTAAAGAGGTGAGGGGGG
CGAGAGCAGCAAAGGACACTGGAAAATGAGAAGCATGGATGGGAAGTGTTGCATTGAGCATAATTTGGAGGTA
AAATCTCCAACACCGTAACTGAGTGGCCTGGGGACCTGATAGAAAGCCCTGCTCAGGACTAAGGCAGAGTTCC
CAGTTATATCGCAGATACAAAGAGACCAGGAACACGCTTGTAATCACAGCACTTAGGGAGGCTGAGGCGGGTG
GATGACCTGAGGTCAGGAGTTCGAGACCAGCCTAGCCAACATGGTGAAACCCCCATCTCTACTAAAAATACAA
AAATTAGCCAGGCGTGGTGGCACATGCCTGTAATCCCAGCTACTCAGGAGGCTGAGGTGGGAGAATCGCTTGA
GCCCGGGAGGCAGGGGTTGCAGCGAGCTGAGATCGTACCACTGCACTCCAGCCTGGGCAACAGAGTGAGACCC
TGTCTCAAAAAGAAAAAAAAAAAAGAGAGAAATCAGGAACATCATGAAAGATACAGCAAAATGTTTTACCCCA
GCCCACTGCACCACACCTGGGATTGTGACAATTAACTTGATAAATTGTTCCTTTTCCTGTTCGGAACTGACTA
GGTTGTGCGTGGATGGACCAGTGAAAAGAAAATCCTGTTTGGGTAGGGAAGAGGGAAGTAGAAAACCTCTTTC
GTATTCTTGGTGTCAAGAAATGGGAAGAGAATGAGGGAGCAGAGACCTGGGTTGAGTGTTGGCTCTGCACTAA
ACAGCTGTGTGATCTTGGTCTAGTGCCTTAACCTCTCTGAGCCTCAGTTTGTACATCAGTAACATTGGGATAA
TGACATCCACATGCCCACTTCACAGAGCTGCTGTGAGGACTGGATGAGAAATGTAGAGAAGTATTTCGGACAC
CATAAAGCTCAAATACAAGGTGTTGGTTAGGAAAAGTTTCAACTGACTTGTACCCACCTGATACCCCTCCATC
AGCATAAGCGTGTATGAGGATGTTAGGTACATGTGTTGTGAGTGAAAGCTCTGGAACACCCGAGTAGAGCTTT
CTGCAAATCAGCTTCTCCTTCAGAGGAGACCATTTTGTTTTGCTTTCCAGCAGTTACTTGAAGAAGCCTTATC
TGAAGTCACAACAGTGACTTCAGGAATAGAAGGGACCAATGGCCAGCTTGCTGAAATGTAATGCCATTCTTAA
AAGCCAGCTAAGAATCAGACCGTATTAGTTAAGGACCCATAAGAGTAGACATTTAGAAAAAGTGAAAAATGGC
AAGAGTGGCCCAATCTTTTGAGAGTTTAGAGAAAATATCATTTGGAAAGGGAGTAGCTCTCCTTCTATTTTAG
CCTTATTATTACGGTATCTATAAAGCAATGCCATATTCTAAATCTGCAGAAATAAAATTCTAAGGGGCGAAAG
TCCAAGGCAGAAGTCAAAAGTTTTGCAAGGAAACCGATGAGGTTGCTGACCTGAGCTGGGCAGGGTTGAACAG
GCGAGTGCCAAGATCAAGGTCTCTGATTGTCTCTCCTTGAAAGGTAAGCAGAGAACTAGGGCTATCCCATAAA
TTAAGTGGGAGATTGGAAAGGGGTGCGGACTTCTGTATTGGGGAGAAGGTCTTGGATGAACTGGGGCAGAGAA
CTGCCAGAGAGAGTACCTAGGAATACGTTGTTAGCAGGAGAAAGACCAAGTTCAGATGCAGACTTGGGAAAGT
AGGTAACTTGACCAAAGGTAGCAAAATTAGACTACCCAACTGGATTGTGAATGCAGTTTATGAAATGGATCAG
GACAGGAGCAAAAATAGATTTTCTAGAAACTGCAGACTCCTGTGATTGGAGCAGTATACAAAGTACAGCAACA
TCAGACTAGATCTCACCTGAGGTGCTGGGTGAGAAATCTTAGGGACCAGATGGAAGAGGGCCTGTGTATAAAG
ACATTAGGAAGGAGGTTTGGGAGGGCAGCCTGACTTGTCTCCAGAGAAAGTTAGAACTGGTTGACTTAGCAAC
CAAGGGACACTGGGTCAAAGACGAGGAATCAGGACGTCGGTGCCTAGTGACTGAGCGCCAGCCCAGCCCATTT
CTCTACATTGCCATGGGCTAAACCCAGTGTGCTGTAAACTCTTCAGTTCCTTTGGTTATGGATTTTGTATCTT
TTCTGTGTTTCTTAATAAAGTTCTTTTGAAAAATGGGAACCTTTCTCAGATGGGAATTTTGTATCTTTCCTCT
GTTTCTTAATAAAGTTCTTTTGAAAAATTGGAA
  (SEQ ID NO: 201)
MVSHGSSPSLLEALSSDFLACKICLEQLRAPKTLPCLHTYCQDCLAQLADGGRVRCPECRETVPVPPEGVASF
KTNFFVNGLLDLVKARACGDLRAGKPACALCPLVGGTSTGGPATARCLDCADDLCQACADGHRCTRQTHTHRV
VDLVGYRAGWYDEEARERQAAQCPQHPGEALRFLCQPCSQLLCRECRLDPHLDHPCLPLAEAVRARRPGLEGL
LAGVDNNLVELEAARRVEKEALARLREQAARVGTQVEEAAEGVLRALLAQKQEVLGQLRAHVEAAEEAARERL
AELEGREQVARAAAAFARRVLSLGREAEILSLEGAIAQRLRQLQGCPWAPGPAPCLLPQLELHPGLLDKNCHL
LRLSFEEQQPQKDGGKDGAGTQGGEESQSRREDEPKTERQGGVQPQAGDGAQTPKEEKAQTTREEGAQTLEED
RAQTPHEDGGPQPHRGGRPNKKKKFKGRLKSISREPSPALGPNLDGSGLLPRPIFYCSFPTRMPGDKRSPRIT
GLCPFGPREILVADEQNRALKRFSLNGDYKGTVPVPEGCSPCSVAALQSAVAFSASARLYLINPNGEVQWRRA
LSLSQASHAVAALPSGDRVAVSVAGHVEVYNMEGSLATRFIPGGKASRGLRALVELTTSPQGHFVGSDWQQNS
VVICDGLGQVVGEYKGPGLHGCQPGSVSVDKKGYIFLTLREVNKVVILDPKGSLLGDELTAYHGLEKPRVTTM
VDGRYLVVSLSNGTIHIFRVRSPDS*
```

[0161] An amino acid sequence for the protein encoded by the TSPEAR gene that is a regulator of T cell exhaustion/dysfunction resistance is available from the UniPROT database at accession no. Q8WU66, cDNA NM 144991, with gene location at Chr 21: 44497893-44711572.

```
  (SEQ ID NO: 202)
AGCCACTTCCCTGCAGGCTGAGCGGAGCCCTGGATGGAGCTTGGCACCCAAGCCCCTCATGTCTGCCCTGCTG
AGTCTGTGTTTTGTGCTGCCCCTGGCGGCCCCCGGCCACGGCACGCAGGGTTGGGAGCCCTGCACAGACCTGC
GCCCCCTGGACATCCTGGCGGAAGTGGTCCCTTCTGATGGCGCCACAAGCGGGATCAGGATAGTTCAGGTTCA
CGGTGCACGGGGACTCCAGCTCTCAGTAGCCGCCCCCCGCACCATGAGCTTCCCAGCATCCAGGATTTTCTCC
CAGTGTGACCTCTTCCCTGAAGAATTTTCCATCGTCGTAACTTTGAGAGTTCCCAATCTTCCACCCAAGAGGA
ACGAGTACCTGCTGACGGTGGTGGCAGAGGAGAGCGACCTGCTGCTGCTCGGCCTGCGGTTGTCACCTGCCCA
GCTGCACTTCCTGTTCCTTCGCGAGGACACGGCCGGCGCCTGGCAGACCCGAGTGTCCTTCCGCAGCCCGGCC
CTGGTGGATGGCCGCTGGCACACACTGGTCCTGGCTGTGTCCGCAGGCGTCTTCTCCCTCACCACGGACTGCG
GCCTCCCGGTGGACATAATGGCCGATGTGCCCTTCCCAGCCACCCTGTCAGTGAAAGGAGCTCGATTCTTCGT
CGGCAGCCGGAGGAGAGCCAAAGGCCTGTTCATGGGACTGGTGAGGCAACTGGTCCTGCTGCCGGGCTCAGAC
GCCACCCCAAGGCTGTGTCCCAGCAGGAACGCCCCGCTGGCGGTGCTGTCCATCCCACGGGTCCTGCAGGCTC
TCACGGGGAAGCCAGAAGATAACGAGGTGCTAAAATATCCCTATGAAACCAACATTCGAGTGACGCTGGGACC
CCAGCCACCGTGTACCGAGGTGGAAGACGCCCAGTTCTGGTTTGATGCCAGCCGGAAGGGCCTGTATCTGTGT
GTTGGCAACGAGTGGGTCTCCGTGTTAGCAGCCAAAGAAAGACTGGACTACGTGGAGGAGCATCAGAACTTGT
CCACCAACTCAGAGACCCTGGGCATTGAGGTGTTCCGCATCCCTCAGGTGGGGCTCTTTGTGGCCACAGCCAA
TCGCAAAGCCACATCCGCCGTCTACAAGTGGACCGAAGAGAAGTTCGTCTCATATCAGAACATCCCCACGCAC
CAAGCACAGGCCTGGAGGCATTTCACCATCGGGAAAAAGATCTTCCTGGCAGTGGCTAATTTTGAACCAGATG
AGAAGGGTCAGGAGTTCTCTGTCATTTACAAATGGAGCCACAGAAAGCTGAAGTTTACCCCATATCAGAGCAT
TGCCACACACAGCGCCCGAGACTGGGAGGCCTTCGAGGTGGATGGGGAGCACTTCCTGGCGGTGGCCAACCAC
CGGGAAGGCGACAACCACAACATCGACAGTGTCATCTACAAGTGGAACCCGGCAACCCGGCTCTTCGAGGCCA
ACCAGACCATCGCCACCTCCGGCGCCTACGACTGGGAGTTCTTCAGTGTGGGGCCCTACTCGTTCCTGGTGGT
GGCCAACACCTTCAACGGCACCTCCACCAAGGTGCACTCGCACCTCTACATCCGACTCCTGGGCTCCTTCCAG
CTCTTCCAGTCCTTCCCGACGTTCGGTGCTGCAGACTGGGAGGTCTTCCAGATCGGGGAGAGGATCTTCCTCG
CTGTGGCAAACAGTCACAGCTACGATGTGGAGATGCAAGTCCAGAATGATTCCTATGTCATCAACTCCGTCAT
CTACGAGCTGAACGTGACCGCGCAGGCCTTTGTCAAGTTCCAGGACATTCTCACCTGCAGTGCTCTGGACTGG
GAGTTTTTCTCGGTGGGAGAAGATTATTTCCTGGTGGTGGCCAACTCCTTCGATGGGCGTACCTTCTCGGTGA
ACAGTATTATTTACAGGTGGCAGGGCTACGAGGGCTTCGTGGCGGTGCACAGCCTCCCCACCGTCGGCTGCAG
GGACTGGGAGGCCTTCAGCACCACGGCTGGTGCCTACCTCATCTACTCCAGCGCCAAGGAGCCCCTCTCCAGG
GTCCTGCGGCTGAGGACACGCTGAGGCCGCGGCTGCCCGGCAGCAACTGGGGTGGCCAGGTGGGGGGGGACCC
CAGCACCTCCCCCAACTGACCCTGGACGTCCAGGTGGGCCCAGCCTAGGGCATCCCGGGCCTGGGCATCAGGC
AGGGTGCAGGTGGGGCCATCTGCGGCCCTGGTTCGGGCAGGGACATCCATCCACCTCTGAGTCCTTCTGAGCC
ACAGCCCCAGTGACGGTCTGGTCTTGCAGGCAGAGGCCCAGAGCCCCTGCCAGTGCTCGCCCATCTGAGTGTC
AAGCGGGGATTTCGCTGTCAAGGAACCGTTTCTATACATTTTTACCTCAAACAACAGGACCTCGGTTCATGTC
CCTGCGGCTGGCCTCTCGCCAGCCACTCCTGCAGTGTGCGTCCGGCCGCCTGAGCAGGTGTGGTGCCGTCCCG
CCATTGCCGCCACCTATTTATTGTGTTTTATCTGAACGGAAGTGTATTTATACTGCTCTTTACAAAAGCACCG
GTGCTCCTCTCTAGGCAGCGGGTGGGCACAGCCCCTCACCACGGACACGGACAGAGGACCACCTCCCCATACA
GAGAGAGGCTTCCCTCCCAGCCTCAGTTTACCCGTAAATGCACTAGCGCGAGGTCAGAAATCACAAGCCTGGG
CATGGCCTGGGTCGCACCCCCTCCCCACGGCCCCACCCACAGGGACCTCAACTTCTGGGCCCGGGATTTTTTC
CCTATTCAGCAGCATTTTAATCACATGTCCTCCAGCTGACTGGGACTCAGGCTGCGTGCCTCCGTCTGCCTGT
GTGCTGGCTGTCCTAGCTCCCTGGTAACAGCATCCTCTGCTGGCTCTCCTGTGGTCATCTTGTCTCTGCAGCT
GGGAGAGCTGCTTGTCTGTCCGTCACAGGCAGTGAGGATGAGAGGGGGTGATGGGCGCAAGGCCCCAGGGGTC
CTCCCTCTTAACCCATGTAGGTGCCAGAGAAACCACCCCCACTCCATGAGAAGAGGCTCAGACAGCAGGCTCC
GGGGCCACGCAGCCCAGACCACACCTGCCACGGTCTTCCAGGAACGGTGCTCCTGCTTCTGCAACACAAATCG
GAACAGGAGCGATCCTCAGAGAGTTTACAATGTGCTTTTTCCGCCAATCAGAACTGTGGACAAAACTTCCTAT
TTCCTACACCGCAGCTGTCTGTTCACCTTCAGCTCAGAGAGCACTCCTGACCTTTCGTAATGAAATGGAAGCC
TCCCCTTGTCTGGCAAATAATAAACTCAGTGTCTACTTTTGCCGGCTTTGGGACCTTCGTGTTTTTCCGGGGC
TCAGGTCTCACTCCAGCCATCGCTGTGGCCAGTGGAGAGCCACTCCCCTCTGGGGGCAGTCGCCGAGAGCCTC
CTTCCCCTCCGTCCAGCCAGCAAGGCTTTCCCAAGCGTCCTGGGCAGGAGGGTTGGGCCCTGCTTTCCACCAA
GTCACTCAGAAGGTCCCAATCACACATGATTGGCCTCATTGGGTCAGCACCTGTGAAAGGAAGATTAAAAACT
CGACACCCCAATTCACTCAACCAAGAAGAAAAAAGCTGAAAGCTGAGTCCTGCAGGAAGCTGCCTTTCCCTTT
GCCCTAAGCAGACAGCTGCAGATGAGAGGGTCAGCATCTCCACTAGTGGCTGCTCTGTGTGCCCCTTATCTCA
TGGAAAGTGCCAATTTACTGAGCACGAGATAAACAGGTAACTGACTGTTCCCACCTGCTCCTTTTCTCCTGCA
GCATGGAGCAATCAGTCATGTGACCACACCCTCCTCCCTCTGCCCCCTCCAGCCGGCTTTTCCCCTTGACTGA
AGCCTTCAACATCATCTTGGGAGAGAGGCACAGACCTGTCTCCTGGGTGCATCCTTAGCCTTGGCAAAATAAA
CTTCTCCATTGATCGA
  (SEQ ID NO: 203)
MSALLSLCFVLPLAAPGHGTQGWEPCTDLRPLDILAEVVPSDGATSGIRIVQVHGARGLQLSVAAPRTMSFPA
SRIFSQCDLFPEEFSIVVTLRVPNLPPKRNEYLLTVVAEESDLLLLGLRLSPAQLHFLFLREDTAGAWQTRVS
FRSPALVDGRWHTLVLAVSAGVFSLTTDCGLPVDIMADVPFPATLSVKGARFFVGSRRRAKGLEMGLVRQLVL
LPGSDATPRLCPSRNAPLAVLSIPRVLQALTGKPEDNEVLKYPYETNIRVTLGPQPPCTEVEDAQFWFDASRK
GLYLCVGNEWVSVLAAKERLDYVEEHQNLSTNSETLGIEVFRIPQVGLFVATANRKATSAVYKWTEEKFVSYQ
NIPTHQAQAWRHFTIGKKIFLAVANFEPDEKGQEFSVIYKWSHRKLKFTPYQSIATHSARDWEAFEVDGEHFL
AVANHREGDNHNIDSVIYKWNPATRLFEANQTIATSGAYDWEFFSVGPYSFLVVANTENGTSTKVHSHLYIRL
LGSFQLFQSFPTFGAADWEVFQIGERIFLAVANSHSYDVEMQVQNDSYVINSVIYELNVTAQAFVKFQDILTC
SALDWEFFSVGEDYFLVVANSFDGRTFSVNSIIYRWQGYEGFVAVHSLPTVGCRDWEAFSTTAGAYLIYSSAK
EPLSRVLRLRTR*
```

[0162] An amino acid sequence for the protein encoded by the UBAP2L gene that is a regulator of T cell exhaustion/dysfunction resistance is available from the UniPROT database at accession no. Q14157, cDNA NM_001127320, with gene location at Chr 1: 154220179-154271510.

```
  (SEQ ID NO: 204)
CCCGACTAAGTGACTTAAACTCCCACCTACTCCTGGAATAAGGAGTCAAAGCCCGGATAGGCGCAGTATTCTA
CCTTGTAAATACTGTTATTTGTATATACTGTAAATGATGACATCGGTGGGCACTAACCGAGCCCGGGGAAACT
GGGAACAACCTCAAAACCAAAACCAGACACAGCACAAGCAGCGGCCACAGGCCACTGCAGAACAAATTAGACT
TGCACAGATGATTTCGGACCATAATGATGCTGACTTTGAGGAGAAGGTGAAACAATTGATTGATATTACAGGC
AAGAACCAGGATGAATGTGTGATTGCTTTGCATGACTGCAATGGAGATGTCAACAGAGCTATCAATGTTCTTC
TGGAAGGAAACCCAGACACGCATTCCTGGGAGATGGTCGGGAAGAAGAAGGGAGTCTCAGGCCAGAAGGATGG
TGGCCAGACGGAATCCAATGAGGAAGGCAAAGAAAATCGAGACCGGGACAGAGACTATAGTCGGCGACGTGGT
GGGCCACCAAGACGGGGGAGAGGTGCCAGCCGTGGACGAGAGTTTCGAGGTCAGGAAAATGGATTGGATGGCA
CCAAGAGTGGAGGGCCTTCTGGAAGAGGAACAGAAAGAGGCAGAAGGGGCCGTGGCCGAGGCAGAGGTGGCTC
TGGTAGGCGAGGAGGAAGGTTTTCTGCTCAAGGAATGGGAACCTTTAACCCAGCTGATTATGCAGAGCCAGCC
AATACTGATGATAACTATGGCAATAGCAGCGGCAATACGTGGAACAACACTGGCCACTTTGAACCAGATGATG
GGACGAGTGCATGGAGGACTGCAACAGAGGAGTGGGGGACTGAAGATTGGAATGAAGATCTTTCTGAGACCAA
GATCTTCACTGCCTCTAATGTGTCTTCAGTGCCTCTGCCTGCGGAGAATGTGACAATCACTGCTGGTCAGAGA
ATTGACCTTGCTGTTCTGCTGGGGAAGACACCATCTACAATGGAGAATGATTCATCTAATCTGGATCCGTCTC
AGGCTCCTTCTCTGGCCCAGCCTCTGGTGTTCAGTAATTCGAAGCAGACTGCCATATCACAGCCTGCTTCAGG
GAACACATTTTCTCATCACAGTATGGTGAGCATGTTAGGGAAAGGATTTGGTGATGTCGGTGAAGCTAAAGGC
GGCAGTACTACAGGCTCCCAGTTCTTGGAGCAATTCAAGACTGCCCAAGCCCTGGCTCAGTTGGCAGCTCAGC
ATTCTCAGTCTGGAAGCACCACCACCTCCTCTTGGGACATGGGCTCGACGACACAATCCCCATCACTGGTGCA
GTATGATTTGAAGAACCCAAGTGATTCAGCAGTGCACAGCCCCTTTACAAAGCGCCAGGCTTTTACCCCATCT
TCAACCATGATGGAGGTGTTCCTTCAGGAGAAGTCACCTGCAGTGGCTACCTCCACAGCTGCACCTCCACCTC
CGTCTTCTCCTCTGCCAAGCAAATCCACATCGGCTCCACAGATGTCGCCTGGATCTTCAGACAACCAGTCCTC
TAGCCCTCAGCCGGCTCAGCAGAAACTGAAACAGCAGAAGAAAAAAGCCTCCTTGACTTCTAAGATTCCTGCT
CTGGCTGTGGAGATGCCTGGCTCAGCAGATATCTCAGGGCTAAACCTGCAGTTTGGGGCATTGCAGTTTGGGT
CAGAGCCTGTCCTTTCTGATTATGAGTCCACCCCCACCACGAGCGCCTCTTCAAGCCAGGCTCCAAGTAGCCT
GTATACCAGCACGGCCAGTGAATCATCCTCTACAATTTCATCTAACCAGAGTCAGGAGTCTGGTTATCAGAGC
GGCCCAATTCAGTCGACAACCTATACCTCCCAAAATAATGCTCAGGGCCCTCTTTATGAACAGAGATCCACAC
AGACTCGGCGGTACCCCAGCTCCATCTCTTCATCACCCCAAAAGGACCTGACTCAGGCAAAGAATGGCTTCAG
TTCTGTGCAGGCCACGCAGTTACAGACCACACAATCTGTTGAAGGTGCTACAGGCTCTGCAGTGAAATCTGAT
TCACCTTCCACTTCTAGCATCCCCCCTCTCAATGAAACGGTATCTGCAGCTTCCTTACTGACGACAACCAATC
AGCATTCATCCTCCTTGGGTGGCTTGAGCCACAGTGAGGAGATTCCAAATACTACCACCACACAACACAGCAG
CACGTTATCTACGCAGCAGAATACCCTTTCATCATCAACATCTTCTGGGCGCACTTCGACATCCACTCTTTTG
CACACAAGTGTGGAGAGTGAGGCGAATCTCCATTCTTCCTCCAGCACTTTTTCCACCACATCCAGCACAGTCT
CTGCACCTCCCCCAGTGGTCAGTGTCTCCTCCAGTCTCAATAGTGGCAGTAGCCTGGGCCTCAGCCTAGGCAG
CAACTCCACTGTCACAGCCTCGACTCGAAGCTCAGTTGCTACGACTTCAGGAAAAGCTCCTCCCAACCTCCCT
CCTGGGGTCCCGCCGTTGTTGCCTAATCCGTATATTATGGCTCCAGGGCTGTTACATGCCTACCCGCCACAAG
TATATGGTTATGATGACTTGCAGATGCTTCAGACAAGATTTCCATTGGATTACTACAGCATCCCATTTCCCAC
ACCCACTACTCCGCTGACTGGGAGGGATGGTAGCCTGGCCAGCAACCCTTATTCTGGTGACCTCACAAAGTTC
GGCCGTGGGGATGCCTCCTCCCCAGCCCCGGCCACAACCTTGGCCCAACCCCAACAGAACCAGACGCAGACTC
ACCATACCACGCAGCAGACATTCCTGAACCCGGCGCTGCCTCCTGGCTACAGTTACACCAGCCTGCCATACTA
TACAGGGGTCCCGGGCCTCCCCAGCACCTTCCAGTATGGGCCTGCTGTGTTCCCTGTGGCTCCTACCTCTTCC
AAGCAGCATGGTGTGAATGTCAGTGTGAATGCATCGGCCACCCCTTTCCAACAGCCGAGTGGATATGGGTCTC
ATGGATACAACACTGGAAGAAAATATCCACCCCCTTACAAGCATTTCTGGACGGCTGAGAGCTAATTTGGCCC
AAGGCTGGGGGCTGTGTTTTGTGTGTGTGTATAAATTTGCACTGAAGTCTTGTTTCAGAAACCAGACCACTGA
GGAGAGCCTGCTGAGCTGAGGCCATGGCCTGCGTGGCTTGGGGAAATGAGTTGGTGGATACCTTCTGGGCTTT
TGAACTTGCCCCTCCCCCATTTCCCTCTCCCCCATGTGTCTGACCCTGTCTTACCCATTTCAAGTTCAAGCGG
TGCAGCACCTTCGAAGCATCAATGCACACACCTGCTGTTGCTTTTGATTTCTGGAAGGCATGTAGTTTCAACT
TGTAACAAAAATATTTGTAGTCTTCAATAAACTGTGGTATTTCTTTAGCTAAC
  (SEQ ID NO: 205)
MMTSVGTNRARGNWEQPQNQNQTQHKQRPQATAEQIRLAQMISDHNDADFEEKVKQLIDITGKNQDECVIALH
DCNGDVNRAINVLLEGNPDTHSWEMVGKKKGVSGQKDGGQTESNEEGKENRDRDRDYSRRRGGPPRRGRGASR
GREFRGQENGLDGTKSGGPSGRGTERGRRGRGRGRGGSGRRGGRFSAQGMGTFNPADYAEPANTDDNYGNSSG
NTWNNTGHFEPDDGTSAWRTATEEWGTEDWNEDLSETKIFTASNVSSVPLPAENVTITAGQRIDLAVLLGKTP
STMENDSSNLDPSQAPSLAQPLVFSNSKQTAISQPASGNTFSHHSMVSMLGKGFGDVGEAKGGSTTGSQFLEQ
FKTAQALAQLAAQHSQSGSTTTSSWDMGSTTQSPSLVQYDLKNPSDSAVHSPFTKRQAFTPSSTMMEVFLQEK
SPAVATSTAAPPPPSSPLPSKSTSAPQMSPGSSDNQSSSPQPAQQKLKQQKKKASLTSKIPALAVEMPGSADI
SGLNLQFGALQFGSEPVLSDYESTPTTSASSSQAPSSLYTSTASESSSTISSNQSQESGYQSGPIQSTTYTSQ
NNAQGPLYEQRSTQTRRYPSSISSSPQKDLTQAKNGFSSVQATQLQTTQSVEGATGSAVKSDSPSTSSIPPLN
ETVSAASLLTTTNQHSSSLGGLSHSEEIPNTTTTQHSSTLSTQQNTLSSSTSSGRTSTSTLLHTSVESEANLH
SSSSTESTTSSTVSAPPPVVSVSSSLNSGSSLGLSLGSNSTVTASTRSSVATTSGKAPPNLPPGVPPLLPNPY
IMAPGLLHAYPPQVYGYDDLQMLQTRFPLDYYSIPFPTPTTPLTGRDGSLASNPYSGDLTKFGRGDASSPAPA
TTLAQPQQNQTQTHHTTQQTFLNPALPPGYSYTSLPYYTGVPGLPSTFQYGPAVFPVAPTSSKQHGVNVSVNA
SATPFQQPSGYGSHGYNTGRKYPPPYKHFWTAES*
```

[0163] An amino acid sequence for the protein encoded by the UBE2F gene that is a regulator of T cell exhaustion/dysfunction resistance is available from the UniPROT database at accession no. Q969M7, cDNA NM_001278305, with gene location at Chr 2: 237966827-238042782.

```
  (SEQ ID NO: 206)
GTTACCGAAATGCTGCCTTAGAGCGTAATTTGCAGGAAAGAGGAAGTTTTGTTTTAAACCAGATCTTCAAGAG
TTGAAGCATATTGAAGAAGGAAAAGAATTCTGAAGCAACTGCAGGGTAAAGGCAGCAGTAATGCTAACGCTAG
CAAGTAAACTGAAGCGTGACGATGGTCTCAAAGGGTCCCGGACGGCAGCCACAGCGTCCGACTCGACTCGGAG
GGTTTCTGTGAGAGACAAATTGCTTGTTAAAGAGGTTGCAGAACTTGAAGCTAATTTACCTTGTACATGTAAA
GTGCATTTTCCTGATCCAAACAAGCTTCATTGTTTTCAGCTAACAGTAACCCCAGATGAGGGTTACTACCAGG
GTGGAAAATTTCAGTTTGAAACTGAAGTTCCCGATGCGTACAACATGGTGCCTCCCAAAGTGAAATGCCTGAC
CAAGATCTGGCACCCCAACATCACAGAGACAGGGGAAATATGTCTGAGTTTATTGAGAGAACATTCAATTGAT
GGCACTGGCTGGGCTCCCACAAGAACATTAAAGGATGTCGTTTGGGGATTAAACTCTTTGTTTACTGATCTTT
TGAATTTTGATGATCCACTGAATATTGAAGCTGCAGAACATCATTTGCGGGACAAGGAGGACTTCCGGAATAA
AGTGGATGACTACATCAAACGTTATGCCAGATGATAAAAGGGGACGATTGCAGGCCCATGGACTGTGTTACAG
TTTGTCTCTAACATGAAACAGCAAGAGGTAGCCCCCTCTCCCGTCCTCATGCTCCCTCTCAGTCCCCTGGATT
GCCCCAGTCCTGTGACCATGTTGCCCTGAAGAAGACCATCTTCATGACTGCTCATTGTAGATGGAGAATTCAA
CATAAATACAGCAAGAAAATGTGTTTGGGCTTCTGAAGAGTTGTCTGCTTACCTTAACATGTTTACTTTTTTG
AACTTGTACTGTATAGGCTGTTGGTGAAATTCTTAAGAAGTTGTAATGAACTCAAAATTGAGGCCAGAGCTTG
CTTTCCCTTTTCCCAAACAAAATTGGTTTTCTGCACAAGCGATGCTAATGATGTGTTCAGTGTAACTCGCAGA
TTGGCAATAAGATACCCGCTACAAACTGTGATTGGATGCAAAATCTCTTAGCTTCTTTCACGAATGTTGGCCC
TGCCTAGATGTTGTGAAGCCTCCCAGAATGCATAGAGTCATTCACTGTAGATCTCTTATTGAAATGCGTATTT
TATTTAATGTAAGTATATTTTGGAACAGATTTGTAATTTGTACAATTCAATGCTTTAATTATTTTTTCTATTC
TCATTTAGTTTGTATTTTCATTGTATAGAGCAGACAGAAAGATGTTGGGTCAAGCAACTATTGAAGAGAAATA
CAAAGAAAATATGAAAGGCACATTATTCATTTTGTCCAAATGCAATGAGAATCTCACTCTTAAAAATCAGCTC
TTGCTTTCGGGTCCGGATGTGGTGAGCACATTTTGGAGCCCTTTGAAGCTAGATTTGGATGATCAAAACAAAA
AGGCAGGGAGCCCATTCTAACATGCTGCCCAGAGGAAACTGGCTGGAGCCTGGACCAGCTGGGGTTGATGCTT
TTGCAGTGGTCATGTGATTGTGACCTGGTAGCTACTTATCAGAGAGCCAGACCCTGCTGTCCTGGGAGACAGG
AGCGATGCCTCAGGAATCAGCCCAATGTCTGATGTCACTGAGACTGTACCTGTGGCCTTCTTCTGAGTTTGCT
ATGGCTCCAGGCCCTGCCGGTGGGGTGAGCCTCCTAGGCCTTGGAGGACCAGGAGTCAACAGTGGCATATGCC
ATCCTCGGCCAGGTTAATATACTGCAGAGGAAAAGCCCTGAAGAGAGGCAAGTGGATTTACTCCAGCATGTAG
ACATTTGAACCAGTGAAATCAAACACAAAATAAATGTCTGTCTAGTTTCATTTGCTGCCTGCCTAACACTCTC
AAACTTAACTGCCAGCTTCCTTAGACCTCTGGATTCCCCCATCTGCCATCTACTGGGTTTAGTTTGTTTTTCT
TAATTTATAGAATCTCTGATTGTGAGATCAGTCTGTCACGGAGACCCAGCAGGTGAGGAATGTAGGCCTTGCT
TCCTCTTTGCACCCATTA
  (SEQ ID NO: 207)
MLTLASKLKRDDGLKGSRTAATASDSTRRVSVRDKLLVKEVAELEANLPCTCKVHFPDPNKLHCFQLTVTPDE
GYYQGGKFQFETEVPDAYNMVPPKVKCLTKIWHPNITETGEICLSLLREHSIDGTGWAPTRTLKDVVWGLNSL
FTDLLNEDDPLNIEAAEHHLRDKEDERNKVDDYIKRYAR*
```

[0164] An amino acid sequence for the protein encoded by the UBE2L3 gene that is a regulator of T cell exhaustion/dysfunction resistance is available from the UniPROT database at accession no. P68036, cDNA NM_001256355, with gene location at Chr 22: 21549447-21624034.

```
  (SEQ ID NO: 208)
AGTATGCAGGTCGCTGCAGGGACCCGAGGCGACACGCGCCTGCAGGAGGTGGCACTCCTGCCGCAGCTCTTCG
ATCTGCTTGTCCTTGGCCAGCGGCGCGCTCGCCTGCTCCGACAGGTCCCGAGCGCGCTGGCGGGCAAAGACTT
GGCACAGCTCCAGGCCGGCGCAACTCTCGCCGGGTATAGGCGCGCTCACGGCCCGGAGGAGCTTGAAGAAATC
CGCAAATGTGGGATGAAAAACTTCCGTAACATCCAGGTTGATGAAGCTAATTTATTGACTTGGCAAGGGCTTA
TTGTTCCTGACAACCCTCCATATGATAAGGGAGCCTTCAGAATCGAAATCAACTTTCCAGCAGAGTACCCATT
CAAACCACCGAAGATCACATTTAAAACAAAGATCTATCACCCAAACATCGACGAAAAGGGGCAGGTCTGTCTG
CCAGTAATTAGTGCCGAAAACTGGAAGCCAGCAACCAAAACCGACCAAGTAATCCAGTCCCTCATAGCACTGG
TGAATGACCCCCAGCCTGAGCACCCGCTTCGGGCTGACCTAGCTGAAGAATACTCTAAGGACCGTAAAAAATT
CTGTAAGAATGCTGAAGAGTTTACAAAGAAATATGGGGAAAAGCGACCTGTGGACTAAAATCTGCCACGATTG
GTTCCAGCAAGTGTGAGCAGAGACCCCGTGCAGTGCATTCAGACACCCCGCAAAGCAGGACTCTGTGGAAATT
GACACGTGCCACCGCCTGGCGTTCGCTTGTGGCAGTTACTAACTTTCTACAGTTTTCTTAATCAAAAGTGGTC
TAGGTAACCTGTAAAGAAAGGATTAAAAATTTAAGATGTTCTAGTTCTGCTCTCTTTGTTTTAAAAATCACTG
CTTCAATCTACTTCAAAAGAATGGTGTTTCTTTTCTTGTCCAATTTTATCCAAAATCTTCAAGTTACATTTAA
CCCATAAGGTTTAAAAAAAAGGAAAAAAAACGGTTGTGGTTCCCTTTCTTCCCTACCCTTGCCACTCCCACTT
TCTGGCACCGAGTTTATTTTTCACTTACTTACTTCCCCAGACCCCGGGCTCGCCTCCACAAAGGAGAAGAGAC
TGCCCTGGCGGTCCTGGTGGCTTTTCTTAGCATGTGTGGCACTGTTGCCCAGTGTGGGAGTTGGTTTAAATTC
TCCTGACTCCAGTTTATAACATCCTTTTAAAAAATTTAAAAACAAACAGCCACACCCCTCCTCCAGTCCTTCT
CCTCAGTTCTTGTGTGAAACTCCAGCTGATGTTACCACAGTAACATCAGTTAATTGGGCAAGCCCTGATGTCA
GTGTGTGTAACTGACCTCTGGCCTGGCCTGCACAGAGAAGCCCTATAATCACAGGTCTGTGGTGGCCCCGAAA
TGGGGGGCCTGCTAGTCAGGAGGATGCTGTGCACACTGTGTGTGATGAATCTCGCCAGAAAGGCTCCTGAGGT
CCCAGGTTGGCACTTCTCCCTGCAGCCATTGTAGAAGATCTGCTGGTCCTTGCAGGCAAAGCTACAGCCAGAA
TGTCCGTTTGAAACTCCTAGCTCATCTGTCACCGAGCTTCATCCGAATGTGCCACGGAGCTTGCTCTCCACTT
CCTCCGTGCAGTGGCCCTGCCACAGCCCTCCCTCGGCACACTTTGACCCTTTGTAGGATTGGAATTAGCAGGA
CTCGGCTATTTAAAGCACCAGTCTGGGGTCGCCTGGGCCCCTGCTGACCCCCTCCTCCAGAGCAGCCAGCCCA
GCCCGGGAACAAGACGGACTTCCTCTCCCTTCGGACTCACAGCCTTTGCAGAGTCAAGCTCCACTTGAAGCTC
ACTCAGTAATATCCTTTCAATGTGTTTTATATTGTTTTGACTGCCTTTTTTTGTAGAAATAAAAATTGACCTT
AGAATTTATCGTCAGATAAACTTGTAAAGATTTGAATATTAATGTCTTTTCAAGGCAAATGGGATTGTCCCCG
CACTAGTAGAGAATCCATGTCGCTCTGACACCCCAAGGAAGCCGACGATCCAAATGCCGTGTGTCACCAACCC
CGCTTCTGCCACTGGCGGCTTCCCTTCTTGGCTCTTGGGGGGGACTAGATCCTGTGGAGAAGATGACTTAAAC
TTTGCTTTTTGTTTTAATTTTAATTCTATAACTTGAGATCTTTCCGGGGCCTACAGGCGTGTAAGACAGCTTG
GTCTGGTCTGTGCAGAAGTGGGGAGTGATGGGCAGGTTCGGCAGCCTAACATTGTTCAGGCGCATGGCCCCTG
CGGTGTGTACACGAACTCGGCTTCTTTTGTCCTAGGTACGCCAAGGGCAGGTTTCTGGAGACTCCCTTGTGCC
CGGGATGGCAAGGGCACCGGGCTGGCGTTTCCACATCTGTCTTCATTAGCAGAAAAGTGATGATGGATTTTAT
TTCACTCACACTCCAGTTTGTAATAAAATGCCAAATTCTGTCAGCTATCCAAACAAGCCACCATTTGTTCTTG
TTGCTTCTCTGGATCCAGAAATGTTGCCATTCTTGGAAACTGTCCCATTGCTTCGTATTTCTGCCAACGTAGC
TCTGCCTGCCTGTCAACCCCTCACTGCACTCTGCTCATCACGGGAGGATACCTGTGTGCCGGCAGCCCCTCAG
GGACTCTCAGCCCTGGCACTGGCACCCCAGGGTTGGCCCCGTCAGCAGAGGCTTGGCTTTCGAGCCAGTGGGT
GTCTCTCCTTTGGGCCTGGGCGGCTTGCTCCTGCCAGCCATGCCTTCAGGGTAGGCTCTGAGCAAGCTGGCGA
ACAGCCCTGGCTGCTCCAAAACCAAAAAGCTGGGTCCTCTGGAGGAGGGGCGAGCTGTGGAGCAGCCACCCAC
TGCTGCCCCAAGCTCACTCAGGAATTCACACCCGCCTGGTTTCTTGAAGTGTGCTGGGTCCTTCCCTCTGCTC
CCTACTCCCCACCACGGCAGAGAATAGGCTTTCTAAGATGCTGCGATCCCGTTCTGCTGCCCGTAATAAAAAT
GCTCTCAGACACTG
  (SEQ ID NO: 209)
MQVAAGTRGDTRLQEVALLPQLFDLLVLGQRRARLLRQVPSALAGKDLAQLQAGATLAGYRRAHGPEELEEIR
KCGMKNFRNIQVDEANLLTWQGLIVPDNPPYDKGAFRIEINFPAEYPFKPPKITFKTKIYHPNIDEKGQVCLP
VISAENWKPATKTDQVIQSLIALVNDPQPEHPLRADLAEEYSKDRKKFCKNAEEFTKKYGEKRPVD*
```

[0165] An amino acid sequence for the protein encoded by the WDFY1 gene that is a regulator of T cell exhaustion/dysfunction resistance is available from the UniPROT database at accession no. Q8IWB7, cDNA NM_020830, with gene location at Chr 2: 223855716-223945357.

(SEQ ID NO: 210)
GTCAGCTGATGGGCTGCCTGCCGAGGAGGCCGCAGCAGTCGCCGCGCGAACATGGCGGCCGAAATCCACTCCA
GGCCGCAGAGCAGCCGCCCGGTGCTGCTGAGCAAGATCGAGGGGCACCAGGACGCCGTCACGGCCGCGCTGCT
CATCCCCAAGGAGGACGGCGTGATCACGGCCAGCGAGGACAGAACCATCCGGGTATGGCTGAAAAGAGACAGT
GGTCAATACTGGCCCAGCATTTACCACACAATGGCCTCTCCTTGCTCTGCTATGGCTTACCATCATGACAGCA
GACGGATATTTGTGGGCCAGGATAATGGAGCTGTAATGGAATTTCACGTTTCTGAAGATTTTAATAAAATGAA
CTTTATCAAGACCTACCCAGCTCATCAGAACCGGGTGTCTGCGATTATCTTCAGCTTGGCCACAGAGTGGGTG
ATCAGTACCGGCCACGACAAGTGTGTGAGCTGGATGTGCACGCGGAGCGGGAACATGCTCGGGAGGCACTTCT
TCACGTCCTGGGCTTCGTGTCTGCAATATGACTTTGACACTCAGTATGCTTTCGTTGGTGATTATTCTGGGCA
GATCACCCTGCTGAAGCTTGAACAGAACACGTGTTCAGTCATCACAACCCTCAAAGGACATGAAGGTAGTGTC
GCCTGCCTCTGGTGGGACCCTATTCAGCGGTTACTCTTCTCAGGAGCATCTGACAACAGCATCATCATGTGGG
ACATCGGAGGAAGGAAAGGCCGGACGCTGTTACTTCAGGGCCATCATGACAAGGTGCAGTCGCTGTGCTACCT
TCAGCTCACCAGGCAGCTCGTCTCCTGTTCCTCGGACGGCGGAATTGCAGTGTGGAACATGGATGTTAGCAGA
GAAGAGGCTCCTCAGTGGTTGGAAAGTGATTCTTGTCAGAAATGTGAGCAGCCATTTTTCTGGAACATAAAGC
AGATGTGGGACACCAAGACGCTGGGGCTAAGACAACATCACTGCAGGAAATGCGGGCAGGCTGTCTGCGGGAA
GTGCAGCAGCAAGCGCTCAAGTTACCCAGTCATGGGCTTCGAGTTCCAAGTCCGGGTTTGTGATTCTTGTTAC
GACTCCATCAAAGATGAAGATCGGACTTCTCTAGCGACCTTTCATGAAGGAAAACATAACATTTCCCACATGT
CCATGGACATTGCCAGGGGACTGATGGTGACCTGTGGGACCGACCGCATTGTAAAGATCTGGGACATGACACC
TGTGGTGGGCTGCAGTCTGGCGACTGGGTTTTCTCCGCACTGATCTGAGAGCTGGGCGGCGTCCACACCTAAG
AACAGCAGCTCCACCAAATGAAGTCCCTCTCACGCAGCTCCACAGCGCTGTCTCGTGAATGGACAGTAGCCAC
TTACAAACAAATCAACATTTTTAAAAAGAAAATGTAAAGGTGTGTTTTGGGGCATTTGTGGAACTTACCCATG
GGGACTAATATGGAAAAGGTCTGTCCATAGTGGTTCCCTGAAGACTGGAATTACTTCAGCAAAACTTCCCCAT
GAACAGCTAATGTGTAGTGAAAGAATGAGCTAGCAAATGAGTTTTAGCGGGGACAAAAAATCAAACAAAAAAG
TGAATGCTTAGAACCTTCTCAAAGCAGTCACAAGTACAGACACTTCACTTAGCCTAGGGGGCCTTCCAGGGTT
CTTGTGGCTGTTGTCAGAGCAGGAGCTGGGGGAGGGAAGACTTGTTCTCTCTTTCTTGAGGGGTGGCATTAGG
AACTTACGAAACCAGAGACCTTTCCCTATGACTTGGCAGTATGTGAATATCCTCTACACTTAGTTATTGATAA
ACTTCTTAAAGAGATCTGTTATTTTCAGGTAGTGCCATAATCTGCACTTAGCATTGGCTTGCTTCAGTTGTTT
CTCTTCCCAGCCAGTATGCCACAGGTGAACTTTCGGGGTTGTCATTAAGTAAGTTGTGAAATTTCTGTAATAA
CAAAGGCAGTCCGCATTCTTCCCTTTCCCCCAAATTCCTAGGGCAAAACTTTTTTATGGTGCTGTTAACATGG
GAGTCACACAAGCCGCCTGACTTTTTCTCATTGCCATTAGTAATGACTGATGGAAAACCCAGCCACCACTGTG
ATGCGAAATGATCAGTCTGTTGCCTGAAACAGCCCAGTCCTCTTAACTGAAACAGCATTCTACTTCTTGTTCC
AAGATGAGCCTCTGCAATATTCTGGCAATTTAATATACCCCCTACAAAAGCACTCCACAGCTTTTACACTATT
TTGACTTTGAGTTATAACTAGTATTATTCATGTTTTCATAAAAAGAAGTTAGTGACCCAGAGCTATAATCATC
CATCAAGTCTTCCACAATAATTCCCAACTCATAAATTGCTTTCCTAACAACTAGCAAAAGCTATTGTTCATAA
TGGCATTTCTAAAGCTTTTGGGCACTGTGTACCAGGATGAGGAAGAGAAGAAATGAGGAGCCTGTCTTTTAAT
ATTCCAGTATTTGTGTGTTTGATTTTTTTTGACAACAGTACATATATCTATTTCTCTAGGGATATGGAAGTAA
GTGGAGAAGGGCCTACCTTTTTAAAGGACAAATATAAAAATAGCAACAGTATCTTTGCTAATCTTACTAATAG
ATATTGATTAAAAAAAAAAAACCTCAGTACTGCATCACTGTGTTGGGATCATACCAGGACAATAGGGTCATTC
CATATGATAAAACTAAAGGACTAAATTTGTTTTATAATGATGTCTTAGAGGGACTGAAAGGTTTAAGGAGGCG
ATCAAACTAAAATGTCTTAATGGCTGTGTGACACACGTAAGGAAAGGAAAGGGGGTCACGCACATCATGTACT
GGAATGATCTGCATTAAACATAGACTTGTCTTCAGAAATAAGACTGAAGGGTTTTGTTGTTCCTTAGAGTTTT
CGTGTTACATCACCTAAAGAGATTTCTTTTAAAAACTTTCTAGACTCTTTGCAAAATGTATATTACTAACATA
GTTTGGAAGAAAAATTGAGTAGTGGTAAGTTTTGTTCAAGCACAATGTTGAATGTTAAGCTTCCTGTATTAAT
TTTAGTTCAGTTAATGGTTCAGCCCATACAAAGGTGCTATCCTAGGGATTTTATGAATTCCTGAAAGGAAAAT
AGAATATGATCAATTCCTTGCCCTGTGGAAGAGTGCAGAACTGTGGTTTTGTTTTCCTTTGACTTCTGTAAAA
TGTGACCGTTTGACATCTGTGGTAGATTGAACGGAATATCACAGCTGCTGAGTTTACTCCATAGCTTTCAAAC
CTTTTTTATTTTAAGAAATTCTTGAAAAACCCTATGTTCCATGGGAACATAAAGTTATTATAGTGCCTCCTAA
GGGGTTAATATAAATCAAGGAGGAAGTTTATATTTAAGGAAGAATTGGAGTGACGTATCTTAGAAAAGGAAAG
GCTGATGTTTCCATATAGCTTGCTCTCCACCAGGCCTATCATTTTTCTTTTTAGAGACAAACGTGACAGGCTA
GTCTTGTCTCTCTCATATGCTAGGTAGCAAATGGGGTGATATTTTTATAGAAGTGGGCAAAAATTATTTTCTC
AATTTTACTGAGTAGGCACAGAAGAAAAGTACAGATAGGCTGATGGTTATTGCCTTATTTTGACTGCATTTCT
CTTAAATGGATCATTTAAATTAGTTCTTCAAGTAACAGTTTACTGGTTGTTCCATTCCTGAATATGCAGGCTA
ATTTGTACAGATAGGGATTAAGGAATACAGACTATTAGAGAAGATCCTTATATTTACATCTAGTATATATGTG
GTAAGGAAATGCCGATTCTTCATTATAAACAAGTTTTAAAATTGTTCTTTCTTAGTTCAAATGATAGCAATAC
CCCTATAGCATTAGGTAGAAACAAATTATTCATTACATCGTAAATCTCTTTACTATGTCCTAGCTCTGTCCTG
CTACCTAAAGGATATAAAGAAATACTATTGCTCTAGAATGTATTACTTTGTTCTCCCATGAAAGAATTCAGTT
TGTTAGTACCTATATTTTTAAACTGGTGAAACTGACCCAAATATGTAATAAATACCATAGTAGCTCAGACCCA
AGGAGATATTTTTCTAAAATCAGTTTTCGTTAAAGTACTTCTACTTCCGTTATTGGATATGGTATCTCCTAAA
GTGTAAAAAAAATCTGTTACTATATAGTGATAAACCATCTGCTCATCGTAAGTGTAAGGCTTAACAAATAAGT
AATACATGCTATATTTATTCAAGTGTCTATTGCTTAATTGTTAATTGTGAGCAGATTTATTGAATGCCTATTC
TATTTTCTGCAGTTTACAATACAATAACTCTTTGAGTAAGTTGAAGTTTAATTGTGCAACAAATTTGTATTAG
AGTACAATTTAAAGTGTTTTTCTCTATAGCCTTTTTTGACTGGGGAAGCAAGGGGTAATGTTAATTAGTACAC
TTTGTTCTTGTACTAGCTATGTTTCTATAAGATATGGTGCCCTGTGTATCCCAGAGATGCTAGAAAACTGTTC
TTTGCTCCTATTTGTGGGTTCTGTTTTTGTGGGTTTTTTTTTTTGAGAAAATGTACACAATAAAACATTCCTT
GCTTGTTA
(SEQ ID NO: 211)
MAAEIHSRPQSSRPVLLSKIEGHQDAVTAALLIPKEDGVITASEDRTIRVWLKRDSGQYWPSIYHTMASPCSA
MAYHHDSRRIFVGQDNGAVMEFHVSEDENKMNFIKTYPAHQNRVSAIIFSLATEWVISTGHDKCVSWMCTRSG
NMLGRHFFTSWASCLQYDFDTQYAFVGDYSGQITLLKLEQNTCSVITTLKGHEGSVACLWWDPIQRLLESGAS
DNSIIMWDIGGRKGRTLLLQGHHDKVQSLCYLQLTRQLVSCSSDGGIAVWNMDVSREEAPQWLESDSCQKCEQ
PFFWNIKQMWDTKTLGLRQHHCRKCGQAVCGKCSSKRSSYPVMGFEFQVRVCDSCYDSIKDEDRTSLATFHEG
KHNISHMSMDIARGLMVTCGTDRIVKIWDMTPVVGCSLATGFSPH*

[0166] An amino acid sequence for the protein encoded by the ZBTB21 gene that is a regulator of T cell exhaustion/dysfunction resistance is available from the UniPROT database at accession no. Q9ULJ3, cDNA NM_001098402, with gene location at Chr 21: 41986831-42010387.

(SEQ ID NO: 212)
GACGTCAAATTCAAGATGGATGGAATCACAGCGGCAGCGGCGGCTGCGGCGCGCGCGAGCCGAGTGTGAGCGG
AAAGGGGCCCGGCGTCTGCCTCGAGACTGAAGACCGAAGACATGAAGTAGAAACAATCCAGGAAGGCTTTGGG
AAGCTATTTGTGTGCGAGGATCAAAGTGATAAACTCAAGCCATGGAGGGATTACTGCATTACATCAACCCTGC
ACACGCCATTTCTCTCCTAAGTGCCCTGAATGAGGAGCGTCTCAAAGGACAGCTGTGTGATGTGCTGCTGATT
GTTGGAGACCAAAAGTTCCGAGCTCATAAAAACGTCTTGGCTGCCAGCAGCGAATACTTTCAGAGTTTATTCA
CAAATAAGGAAAATGAGTCACAAACTGTATTTCAGCTTGACTTCTGTGAGCCAGATGCTTTTGATAATGTTTT
AAACTACATTTATTCTTCCTCTCTATTTGTTGAGAAGAGCAGCCTTGCTGCTGTGCAAGAACTTGGCTATAGT
CTTGGGATTTCCTTTCTGACTAACATCGTTTCTAAAACACCTCAAGCCCCCTTTCCAACGTGTCCTAATAGAA
AAAAAGTGTTTGTAGAAGATGATGAAAACAGTTCTCAAAAGAGAAGTGTCATTGTTTGTCAAAGTAGAAACGA
AGCGCAAGGAAAAACTGTTAGTCAAAATCAACCCGATGTAAGCCATACTTCCCGGCCCTCTCCTAGCATTGCA
GTCAAGGCCAATACCAATAAGCCACATGTCCCAAAACCAATAGAACCACTTCATAATTTGTCATTAACTGAAA
AGAGTTGGCCGAAAGATAGTTCTGTGGTATATGCAAAGTCTCTTGAGCATTCTGGATCTTTGGATGATCCTAA
TAGAATCAGTTTGGTGAAAAGAAATGCAGTGTTGCCTTCAAAGCCTCTGCAAGACAGAGAAGCTATGGATGAT
AAACCAGGTGTGAGTGGTCAGCTTCCAAAAGGAAAAGCTCTAGAGCTGGCTTTGAAGAGACCACGGCCACCTG
TTTTGTCTGTTTGTAGCTCATCAGAGACTCCCTATCTATTAAAAGAAACTAACAAAGGAAATGGTCAAGGTGA
AGATAGAAACTTGTTGTACTATTCAAAGTTAGGCTTAGTGATCCCATCCAGTGGATCTGGTTCTGGAAACCAA
AGCATTGACAGGAGTGGCCCACTTGTTAAGAGTCTCCTCAGACGGTCATTGTCGATGGATAGCCAGGTTCCTG
TCTATTCACCTTCCATAGATTTGAAATCTTCCCAGGGATCATCTTCGGTGTCCAGTGATGCACCAGGGAATGT
GTTGTGTGCTTTATCTCAGAAGTCATCTTTAAAAGATTGTAGTGAAAAAACAGCCCTAGATGACAGGCCTCAA
GTGCTACAACCGCATCGCCTCAGGTCCTTTAGTGCTTCTCAGTCAACAGACAGGGAGGGAGCTTCCCCTGTGA
CTGAGGTGCGCATAAAGACTGAGCCCAGCAGCCCGCTGTCGGACCCCTCGGACATCATCCGCGTCACTGTGGG
AGATGCGGCAACAACAGCAGCTGCCTCATCTTCGTCGGTCACAAGAGACCTGTCTCTGAAAACAGAAGATGAC
CAAAAAGACATGAGCAGACTCCCAGCAAAAAGGAGGTTCCAAGCGGACCGAAGATTGCCGTTTAAGAAGTTAA
AGGTGAATGAGCACGGGTCTCCTGTGTCAGAAGATAATTTTGAGGAAGGCTCAAGCCCTACTCTCCTTGATGC
AGATTTTCCAGATTCTGATTTGAATAAAGACGAATTTGGTGAGTTGGAGGGGACGAGACCAAACAAAAAATTT
AAATGCAAACATTGCCTTAAGATCTTTAGATCAACAGCAGGTCTTCACCGTCATGTTAACATGTACCATAACC
CAGAAAAGCCCTACGCTTGTGACATCTGTCACAAGAGGTTTCACACCAACTTCAAAGTGTGGACACACTGTCA
GACCCAACACGGCATAGTGAAGAACCCATCACCAGCCTCTAGTTCACATGCTGTTTTGGATGAAAAATTCCAA
AGAAAGCTGATTGACATAGTGAGAGAGAGAGAAATTAAGAAGGCCCTGATCATTAAGTTAAGGCGCGGCAAGC
CTGGTTTTCAGGGACAGAGTAGCTCCCAAGCACAGCAAGTCATCAAGAGGAACTTGAGATCTCGAGCCAAAGG
AGCTTACATTTGTACTTACTGCGGAAAAGCGTACCGCTTTCTCTCTCAATTTAAGCAGCATATAAAAATGCAT
CCAGGAGAAAAACCCCTTGGAGTAAATAAAGTTGCTAAACCAAAAGAGCATGCTCCTCTTGCAAGTCCAGTAG
AAAACAAGGAGGTTTACCAGTGCCGCCTCTGTAATGCTAAGCTCTCTTCTCTCCTAGAGCAAGGAAGCCACGA
GCGGCTGTGCCGGAACGCGGCCGTCTGCCCTTACTGCAGCCTCAGGTTTTTCTCGCCCGAGCTGAAGCAAGAA
CACGAGAGCAAGTGTGAGTATAAGAAGCTGACCTGCCTCGAGTGCATGCGCACCTTCAAGTCCTCTTTCAGCA
TCTGGCGGCACCAGGTTGAAGTCCATAATCAGAACAACATGGCACCCACCGAAAACTTTTCTTTGCCCGTTTT
GGACCACAATGGTGATGTGACTGGTTCTTCAAGGCCCCAATCCCAGCCTGAGCCCAACAAAGTAAACCACATC
GTCACCACAAAAGACGACAACGTGTTCAGTGATTCTTCAGAACAAGTTAACTTCGACTCGGAAGATTCCTCTT
GTCTTCCCGAAGACCTTAGTCTTTCCAAGCAACTGAAAATCCAAGTCAAAGAGGAGCCTGTGGAGGAGGCTGA
AGAAGAGGCACCCGAGGCCAGCACAGCCCCCAAAGAAGCGGGTCCTAGCAAAGAAGCCAGCCTGTGGCCCTGC
GAGAAGTGTGGGAAGATGTTCACGGTGCATAAGCAGCTGGAGCGTCACCAGGAGCTTCTGTGCTCTGTGAAAC
CATTTATTTGTCACGTGTGCAACAAAGCTTTTCGCACTAATTTTCGACTCTGGAGTCACTTCCAATCGCACAT
GTCTCAGGCTTCAGAGGAATCGGCACATAAGGAATCTGAGGTGTGCCCTGTTCCCACAAACTCTCCCTCTCCA
CCACCTCTGCCACCGCCACCACCACTGCCCAAGATCCAGCCTCTGGAGCCTGACAGCCCCACAGGCCTGTCCG
AAAACCCAACTCCAGCCACAGAAAAACTGTTTGTGCCCCAAGAATCAGACACCCTTTTTTACCATGCCCCACC
CCTTTCAGCAATCACATTTAAAAGACAGTTTATGTGTAAACTTTGCCACAGGACATTCAAGACTGCATTTAGT
CTTTGGAGTCACGAACAAACACACAATTGAAAGACCAACACTTTTTACCTATGGGAGGCAGTCCCCAGATTTC
AACCTGAATTGTGAAATGTGTCATAAGAAACAAAATATTTTTTAAACAAGAATAATAAAGGTTGGAGATTGTT
ACGCTTGAAATTAAGTTGGAGGCAAATTGATAATTACTTAGTAATGTCCTTAACTTTAGAAATACAGCTTTTA
AAATATTGTGGTTCTGGACCTTACAAGAACAAGATGGTTTGATTTCATTAATGTTGAAATTGGATTAGTCTTG
ATTGTGTGCATGGTTCCTCATTCCATGGTGTCAGTATAATCATTTAATTGAGGTTTTTGGTTTTTTATTGATT
AGTGGAATACTGTCGAAGTATTCCTTCTTTTAATTATTTTAGACACTTGAGTTCTAGTTAAATCTTAACCATG
TTCTTAAGTCCAAAATAGGAAGAAGTGGAGTAGTTTGCAGTATTGATTTATATCTTAGACTACTTTAGCAATA
AAAGATAAATCTCAACTTTAATAAGTTATCCTGACACTTGATAAAAATAAATATTTGGTATTTTGTGGTCATG
TAAAACTTCTTTTTGTATGAAAATTGTGAGAAATTTAAATCAGCAATAGTAACACTTAGATTTTTATAAACTA
ACAAAAACTTGCTCTCAGTCAATATAATAAATGATAGTTAAACTCTAAGGAAGACCTGGGAAATGAAAACAAT
TTATGGAAGTCCCCTACAGTCAGTTTATAAGGGCTTCAGTAGTGATAGACATTGTTATAAAAACTTGTACCAT
GTTACATGTACACTGCACCACAGTCTAAATTCAGACCAGCATTTGAAGGACTGCACATATTTCATTTCCTCTG
ATTTATGCTGTCACAAATTGAAAATCTGAGTGTAGTTAGGACAAAAAACAAAGCTAACCATATGGCACTAATT
TTGATTTTAACATTAGTGTAACAAATAAGGTCGGGACATATATTTACATAGATCCCAGACACTCAAGAATTAG
CACAGCTGATGTAAAATTCTAAATTACCATTTACTTCCAGATAGAGCAGAGGAGAAACACCTCACTGCAGTTT
CAACATGCTTTCCAAGAACAATATATACGACATATACATTTTCCTGCCTCTCTCTTGTGACAATTTCTGTTAG
AATTTGTTGGGGGTCTGATGGTTAAAATCATGGGCAAGGCCATTCTCTACATCATTGCTTAATATTTCAAAAA
TAGGTATTAGAGCACTATCAGTGGTCCAAAATTAGTTTTAGCTACTTATTTTGCTCCATGGGTTTTGGGCTTT
TCAAAGAATACTATGTATAATTTGTAATTGAAAGCCTTTCAGTAGGATATCCAAAGTTCAATGTGTTTCAAAA
GGGAAAACTTTTACTTGTGGGGGTGGGAGTTAGATGTATTAAAAAAACGAAACTACAAAATCCTTTTAAGAAA
GTAATACCAATTTAGACTCTAGTTTGTGTTACGAGGTATTCTTTCAAATTTTTTTTAAAAGCCAACTACTGTC
ATTAAGAAATAATTTTAGATTTGTGCTCTAGCAGAAAATAACTCTGTACCCATCAATCTTATTGCCAACATTC
CATACCAGTGGTAGGAAAGATATTCTCATTTTTTTTATTGAACCAGACATTTTTATAAAATACTGATTGACTT
TGTACATTATGGATATTATATATGAAATTTTGCCTTGTATTCTTTCACTTGAAAAAACTCCAAAATTCCACAA
TATTTTAGTAGTTAACTTCCTATTCTTTCTTAAATTTGATGGAGAAGGGAAAATAAATTGCAGTTATTGATTC
TTGCCATCTTTGTTTTCTTAAAGAAATCTATGCATTTTAAGGATAAAACTAAAGCATATGGGTTTACATGAAA
CATCAGGATGGATTATTGTACATTGAATTCATTCCGCGTATAATGTGGTATTTCTTACTCTGTCCATCTTGGT
AGCTGTCACTTCAAAAGAAGACAGTTTCCCTGAGTAATCATCACCTACATGGCCATTAGAGTATCTATCGGTG
ATAATTCCATGATACAGAGTATCTTGGCATTATAAATTCAGTATCCCAGGACCTAAACCTTTATGCTACATTT
TCGAAGATTTTTTAAAAATAATATTGTTAATCAGTAAAAAAAAAAAATATTTTTGATCTAAACATAGGTTCTG
CATATCTGTTAGATTTTAAAAATGACTGGTGTTTTGTCTTCACATTTTTGTCTAAGCAAGGAATATAAGATTT
CAAATAAAATTTTGAACCAAAAACATTTATAATGCCGTTCTGGTTTTTCTATTACTTTTTATACTGTACTTTA
AAAGCATTAGGCTGAAAGAGTTTATTTTGGTGGTCAAAAAAAATATGCTTCCACTCATGTAACTATTTTAAAT
GTTAAGAAGTAAAATAATGAAAGATATGTTAATTACTTTATTCAGTAAAGTTTTTTAAGAATGTTTATCTCAG
CCAGTAGGCAAATACTTGGTGTAAAACAAGTTGGTCTTAAATTGTTGCAACTCATTAGCTAGTGAAGATATTC
ATGTAAATATATTTTAGGATTGTAATTAATTTTGAAAATGTAGAAAGCTCTTTATTCCATGTAAGTATGCAGG
ATGCCTGCTTTTTTATGCAGTTGTGGAAAGAATGTAAAATGTTTTAATATATTCTTTGTTAATCTGAGAACTT
GATACTGAATCGTTTATGTGGGAGAAGGAAGGAGTAACATAAAACATGTTTTTATCACTCAAAGTAAGCAATG
GAGGTAACAAATATTGTGCATTTTAACAGTAATATTTGAAGATTTGTAGAATATTCACCTTTAAAACTAGTTA
GTATGCATTTATAATTTTACCAGAATATACAACTAACAATTCAACAGTGATGTTCTTTGCATTTGTGGGGAGA
TGTGTGATGTTCTTGGTTTTCTGGTTTGGAATGGAACGTTTATAGCCTTGCCTGTAAAAATGTGCCCCAGCAC
TTAATGAGTGACCGTTTGAATCCATATGTAGTCCCATTGGTGCTAATGAGAGTAGCTGCTGTGAAACAGGAAT
AAAATGTGTCTGTTCACGGAGGTGCGGTGTGGATGCACCTACAAGGCCAACTCTCTGATCAGGGTGAGGGAGA
GATGGAAGAATTAACAGATCTAAAGTTGGCCTTTGTTGTCTCAAATTGGGTTTGTACACACATGCATGCATGT
GTGTATACAACTGTAATCTGGAACTTCAGGAAGTAAAATTATTTGAAGTTTCTTAGTAAAAAGTAATTAGGTA
TAATTCCAAATAGATTTCTGTATAAATTGTATCTAACTGGATTACAAGTCAGTTTGACAATTTACGATGTCTC
AGTGATGTTTCTGCAATAATTGTGAAATGCATTATTGATTTAAATAATGCTGACACGTACTCTTTAAAAGTGT
TCTTTAACACTGACTACTAAACTTTAAGTTTTAAAAAATAGGTTTTCATTTATGGCTTTTTGTGGTTTTAGCA
CTTTAAGAAGTTTAATTTTTTGTAATTTTTAATATGCTCTTTCAGTGTATCTCAGCGGGTACTCCAGCTTGTG
GCATTCCCATGTGACTGGGGAGAAGACAAAATTGGTGTTTAGATTCTGGAGGAGAAAAAATGAGTTACAATGT
CAGGTGTTTTTAAAAATTCCTTTTAGAGACAGTCTTTTGGGAACCAAAGTATTTTACTGTAAATCTTTAAAAT
AACAGAATTCAGTGCTCTTTCATTTGTTAATGCTGTCCAGATTTTTCACACAGTTATACTCAGTTAATACTAG
TTTTCAGAACATTAGTCCAAGGCTATTTCAAGTTTTCCATTGAATATATGCTTATGGTTAAAAGAAAAACGAA
TGGTTTTATAATTCTGTGTATTTTGTCATATGCCTTAGCAGAGTAAGTCATTTTTCCATTTTACTTAGGAATA
AGCTTTTTCGAACTGAAAATTCATGGTAAAATAGGATTTCTATCTAATGTTAATCCATTGCTTATTTGTATTC
AATTCCATTGTCTACAGTTTGCTTAAATGTTGACTAAGAATGATTGGAGTCAATAAATTTGTACTGTATTTTG
CTTCGA
(SEQ ID NO: 213)
MEGLLHYINPAHAISLLSALNEERLKGQLCDVLLIVGDQKFRAHKNVLAASSEYFQSLFTNKENESQTVFOLD
FCEPDAFDNVLNYIYSSSLFVEKSSLAAVQELGYSLGISELTNIVSKTPQAPFPTCPNRKKVFVEDDENSSQK
RSVIVCQSRNEAQGKTVSQNQPDVSHTSRPSPSIAVKANTNKPHVPKPIEPLHNLSLTEKSWPKDSSVVYAKS
LEHSGSLDDPNRISLVKRNAVLPSKPLQDREAMDDKPGVSGQLPKGKALELALKRPRPPVLSVCSSSETPYLL
KETNKGNGQGEDRNLLYYSKLGLVIPSSGSGSGNQSIDRSGPLVKSLLRRSLSMDSQVPVYSPSIDLKSSQGS
SSVSSDAPGNVLCALSQKSSLKDCSEKTALDDRPQVLQPHRLRSFSASQSTDREGASPVTEVRIKTEPSSPLS
DPSDIIRVTVGDAATTAAASSSSVTRDLSLKTEDDQKDMSRLPAKRRFQADRRLPFKKLKVNEHGSPVSEDNF
EEGSSPTLLDADFPDSDLNKDEFGELEGTRPNKKFKCKHCLKIFRSTAGLHRHVNMYHNPEKPYACDICHKRF
HTNFKVWTHCQTQHGIVKNPSPASSSHAVLDEKFQRKLIDIVREREIKKALIIKLRRGKPGFQGQSSSQAQQV
IKRNLRSRAKGAYICTYCGKAYRFLSQFKQHIKMHPGEKPLGVNKVAKPKEHAPLASPVENKEVYQCRLCNAK
LSSLLEQGSHERLCRNAAVCPYCSLRFFSPELKQEHESKCEYKKLTCLECMRTFKSSFSIWRHQVEVHNQNNM
APTENFSLPVLDHNGDVTGSSRPQSQPEPNKVNHIVTTKDDNVFSDSSEQVNFDSEDSSCLPEDLSLSKQLKI
QVKEEPVEEAEEEAPEASTAPKEAGPSKEASLWPCEKCGKMFTVHKQLERHQELLCSVKPFICHVCNKAFRTN
FRLWSHFQSHMSQASEESAHKESEVCPVPTNSPSPPPLPPPPPLPKIQPLEPDSPTGLSENPTPATEKLFVPQ
ESDTLFYHAPPLSAITFKRQFMCKLCHRTFKTAFSLWSHEQTHN*

[0167] An amino acid sequence for the protein encoded by the ZMYND8 gene that is a regulator of T cell exhaustion/dysfunction resistance is available from the UniPROT database at accession no. Q9ULU4, cDNA NM_001281771, with gene location at Chr 20: 47209214-47356889.

```
  (SEQ ID NO: 214)
GGAGCCTGTCCTCCATGTTTTATAAGTATTGACATTACACAGTGTTAACAATGCATCCACAGAGCTTGGCTGA
AGAGGAAATAAAAACAGAACAGGAGGTGGTAGAGGGCATGGATATCTCTACTCGCTCCAAAGATCCTGGCTCT
GCAGAGAGAACAGCCCAGAAAAGAAAGTTCCCCAGCCCTCCACATTCTTCCAATGGCCACTCGCCGCAGGACA
CATCAACAAGCCCCATTAAAAAGAAAAAGAAACCTGGCTTACTGAACAGTAACAATAAGGAGCAGGATGGACG
GAATGATTTCTACTGCTGGGTTTGTCACCGGGAAGGCCAAGTCCTTTGCTGTGAGCTCTGTCCCCGGGTTTAT
CACGCTAAGTGTCTGAGACTGACATCGGAACCAGAGGGGGACTGGTTTTGTCCTGAATGTGAGAAAATTACAG
TAGCAGAATGCATCGAGACCCAGAGTAAAGCCATGACAATGCTCACCATTGAACAGTTATCCTACCTGCTCAA
GTTTGCCATTCAGAAAATGAAACAGCCAGGGACAGATGCATTCCAGAAGCCCGTTCCATTGGAACAGCACCCT
GACTATGCGGAATACATCTTCCATCCAATGGACCTTTGTACATTGGAAAAGAATGCGAAAAAGAAAATGTATG
GCTGCACAGAAGCCTTCCTGGCTGATGCAAAGTGGATTTTGCACAACTGCATCATTTATAATGGGGGAAATCA
CAAATTGACGCAAATAGCGAAAGTAGTCATCAAAATCTGTGAACATGAGATGAATGAAATCGAAGTATGTCCA
GAATGTTATCTAGCTGCTTGCCAAAAACGAGATAACTGGTTTTGTGAGCCTTGTAGCAATCCACATCCTTTGG
TCTGGGCCAAACTGAAGGGGTTTCCATTCTGGCCTGCAAAAGCTCTAAGGGATAAAGACGGGCAGGTCGATGC
CCGATTCTTTGGACAACATGACAGGGCCTGGGTTCCAATAAATAATTGCTACCTCATGTCTAAAGAAATTCCT
TTTTCTGTGAAAAAGACTAAGAGCATCTTCAACAGTGCCATGCAAGAGATGGAGGTTTACGTGGAGAACATCC
GCAGGAAGTTTGGGGTTTTTAATTACTCTCCATTTAGGACACCCTACACACCCAACAGCCAGTATCAAATGCT
GCTCGATCCCACCAACCCCAGCGCCGGCACTGCCAAGATAGACAAGCAGGAGAAGGTCAAGCTCAACTTTGAC
ATGACGGCATCCCCCAAGATCCTGATGAGCAAGCCTGTGCTGAGTGGGGGCACAGGCCGCCGGATTTCCTTGT
CGGATATGCCGCGCTCCCCCATGAGCACAAACTCTTCTGTGCACACGGGCTCCGACGTGGAGCAGGATGCTGA
GAAGAAGGCCACGTCGAGCCACTTCAGTGCGAGCGAGGAGTCCATGGACTTCCTGGATAAGAGCACAGCTTCA
CCAGCCTCCACCAAGACGGGACAAGCAGGGAGTTTATCCGGCAGCCCAAAGCCCTTCTCTCCTCAACTGTCAG
CTCCTATCACGACGAAAACGGACAAAACCTCCACCACCGGCAGCATCCTGAATCTTAACCTGGATCGAAGCAA
AGCTGAGATGGATTTGAAGGAGCTGAGCGAGTCGGTCCAGCAACAGTCCACCCCTGTTCCTCTCATCTCTCCC
AAGCGCCAGATTCGTAGCAGGTTCCAGCTGAATCTTGACAAGACCATAGAGAGTTGCAAAGCACAATTAGGCA
TAAATGAAATCTCGGAAGATGTCTATACGGCCGTAGAGCACAGCGATTCGGAGGATTCTGAGAAGTCAGATAG
TAGCGATAGTGAGTATATCAGTGATGATGAGCAGAAGTCTAAGAACGAGCCAGAAGACACAGAGGACAAAGAA
GGTTGTCAGATGGACAAAGAGCCATCTGCTGTTAAAAAAAAGCCCAAGCCTACAAACCCAGTGGAGATTAAAG
AGGAGCTGAAAAGCACGTCACCAGCCAGCGAGAAGGCAGACCCTGGAGCAGTCAAGGACAAGGCCAGCCCTGA
GCCTGAGAAGGACTTTTCCGAAAAGGCAAAACCTTCACCTCACCCCATAAAGGATAAACTGAAGGGAAAAGAT
GAGACGGATTCCCCAACAGTCCATTTGGGCCTGGACTCTGATTCAGAGAGCGAACTTGTCATAGATTTAGGAG
AAGACCATTCTGGGCGGGAGGGTCGAAAAAATAAGAAGGAACCCAAAGAACCATCTCCCAAACAGGATGCTGT
CCAGCAGAAGGAGATCACACAGAGCCCATCCACGTCCACCATCACCCTGGTGACCAGCACACAGTCATCGCCC
CTGGTCACCAGCTCGGGGTCCATGAGCACCCTTGTGTCCTCAGTCAACGCTGACCTGCCCATCGCCACTGCCT
CAGCTGATGTCGCCGCTGATATTGCCAAGTACACTAGCAAAATGATGGATGCAATAAAAGGAACAATGACAGA
AATATACAACGATCTTTCTAAAAACACTACTGGAAGCACAATAGCTGAGATTCGCAGGCTGAGGATCGAGATA
GAGAAGCTCCAGTGGCTGCACCAGCAAGAGCTCTCCGAAATGAAACACAACTTAGAGCTGACCATGGCGGAGA
TGCGGCAGAGCCTGGAGCAGGAGCGGGACCGGCTCATCGCCGAGGTGAAGAAGCAGCTGGAGTTGGAGAAGCA
GCAGGCGGTGGATGAGACCAAGAAGAAGCAGTGGTGCGCCAACTGCAAGAAGGAGGCCATCTTTTACTGCTGT
TGGAACACCAGCTACTGTGACTACCCCTGCCAGCAAGCCCACTGGCCTGAGCACATGAAGTCCTGCACCCAGT
CAGCTACTGCTCCTCAGCAGGAAGCGGATGCTGAGGTGAACACAGAAACACTAAATAAGTCCTCCCAGGGGAG
CTCCTCGAGCACACAATCAGCACCTTCAGAAACGGCCAGCGCCTCCAAAGAGAAGGAGACGTCAGCTGAGAAA
AGCAAGGAGAGTGGCTCGACCCTTGACCTTTCTGGCTCCAGAGAGACGCCCTCCTCCATTCTCTTAGGCTCCA
ACCAAGGCTCTGACCATTCCCGGAGTAATAAATCCAGTTGGAGCAGCAGTGATGAGAAGAGGGGATCGACACG
TTCCGATCACAACACCAGTACCAGCACGAAGAGCCTCCTCCCGAAAGAGTCTCGGCTGGACACCTTCTGGGAC
TAGCAGTGAATCGGGACACAAACCACCCACCCCATTGGGAGAAAAACCCAGACGCCAGGAAAAGAAGAAACAA
CAAAGGCAGGAGAACAGCCACTTTCAGACTTGAAAATGACAAAACCCTCAGTTGAGCCTGAGCCCCCGGCGCG
GGGGCTGCTACACTACAGGACACCCAGCATCGGCTTTGACTGCAGACTGTTCACCCACACGAGCCCTGTGCTT
TTGGTGTAAATAATGTACAATTTGTGGATGTCATTGAATCTAGAGGACTTTCCCCTTTTTATATTTGTATTAA
CTTTAACTTATTAAAAAAAAAAAAAGAAAAAGAAAAACGATTTAAAAAAAAAAAAAAAAGCAACCAACCCCAA
CAACAAAAAAGAATGTTTTGGTATTGGAGAAGGGATGGTCAGTTAGCCTGTCTGTCACACGACGGAATGGATA
CTGGGCCCGGGGACCACTTTCATACTCACGTCCTCATCCTTGGATACCCAGGGGAGGGCGAACCGTTTTCGCT
CGTGTG
  (SEQ ID NO: 215)
MHPQSLAEEEIKTEQEVVEGMDISTRSKDPGSAERTAQKRKFPSPPHSSNGHSPQDTSTSPIKKKKKPGLLNS
NNKEQDGRNDFYCWVCHREGQVLCCELCPRVYHAKCLRLTSEPEGDWFCPECEKITVAECIETQSKAMTMLTI
EQLSYLLKFAIQKMKQPGTDAFQKPVPLEQHPDYAEYIFHPMDLCTLEKNAKKKMYGCTEAFLADAKWILHNC
IIYNGGNHKLTQIAKVVIKICEHEMNEIEVCPECYLAACQKRDNWFCEPCSNPHPLVWAKLKGFPFWPAKALR
DKDGQVDARFFGQHDRAWVPINNCYLMSKEIPFSVKKTKSIFNSAMQEMEVYVENIRRKFGVFNYSPFRTPYT
PNSQYQMLLDPTNPSAGTAKIDKQEKVKLNFDMTASPKILMSKPVLSGGTGRRISLSDMPRSPMSTNSSVHTG
SDVEQDAEKKATSSHFSASEESMDFLDKSTASPASTKTGQAGSLSGSPKPFSPQLSAPITTKTDKTSTTGSIL
NLNLDRSKAEMDLKELSESVQQQSTPVPLISPKRQIRSRFQLNLDKTIESCKAQLGINEISEDVYTAVEHSDS
EDSEKSDSSDSEYISDDEQKSKNEPEDTEDKEGCQMDKEPSAVKKKPKPTNPVEIKEELKSTSPASEKADPGA
VKDKASPEPEKDFSEKAKPSPHPIKDKLKGKDETDSPTVHLGLDSDSESELVIDLGEDHSGREGRKNKKEPKE
PSPKQDAVQQKEITQSPSTSTITLVTSTQSSPLVTSSGSMSTLVSSVNADLPIATASADVAADIAKYTSKMMD
AIKGTMTEIYNDLSKNTTGSTIAEIRRLRIEIEKLQWLHQQELSEMKHNLELTMAEMRQSLEQERDRLIAEVK
KQLELEKQQAVDETKKKQWCANCKKEAIFYCCWNTSYCDYPCQQAHWPEHMKSCTQSATAPQQEADAEVNTET
LNKSSQGSSSSTQSAPSETASASKEKETSAEKSKESGSTLDLSGSRETPSSILLGSNQGSDHSRSNKSSWSSS
DEKRGSTRSDHNTSTSTKSLLPKESRLDTFWD*
```

[0168] An amino acid sequence for the protein encoded by the KIAA1551 gene (also known as RESF1) that is a regulator of T cell exhaustion/dysfunction resistance is available from the UniPROT database at accession no. Q9HCM1, cDNA NM_018169, with gene location at Chr 20: 47209214-47356889.

```
  (SEQ ID NO: 216)
      1 acttgactta aactctgggg cccgggaggc cgccggtttt ctccccgett gccggggtgg
    61 tcctcttccc tttgtcggac caaagaagta aacactgtgt ggagagggac tgacgtgttt
  121 ggagggaaat gggaatgtac acgataatta aagagtaaag ttgtgctcaa cgctgtttac
  181 ttctaattat ttcctgattc acaaattaat ttttgcaatt cacaacttca agaatacttg
  241 gactattgga ttcaatccat agtaatctgc aaaagaagag aagcagaatt atacctagaa
  301 gtctactaat ggacagttag tcacccacct acatgttgag attcctgaca ttcagacaac
  361 tgacttgtaa ctgacttata actgacttgt aatacactgc tactatatca aaccgacaat
  421 gaattggaat gaaaaaccaa agagtgctac attaccacca ctgtatccta aaagccagcc
  481 accttttttg caccagtctt taataaacca aattaccaca acatctcaga gttctttcag
  541 ctatcctgga agtaaccaag aagcatgcat gtatcccggt aattcaaatc caatttcaca
  601 gccactgctg aatatccaaa attatcctca acaaatttct gtttctgata tgcataatgg
  661 gacagttgtg gcctcacaca cttcagtaga aagaataaca tatgcaaatg ttaatggacc
  721 caaacaacta actcacaatt tgcagatgtc ttcaggagtt acccaaaacg tatggttgaa
  781 ctcaccaatg aggaatcctg tgcattctca tataggggca actgtatctc atcaaactga
  841 ttttggagct aacgtaccca atatgccggc actacagagt caactgataa catcagatac
  901 ctattctatg caaatgcaga tgatcccttc taatictaca cgacttcctg tagcttacca
  961 aggaaatcag ggacttaacc agtctttttc agagcaacag gttgattgga cacaacagtg
1021 tatatataag ggactgactt acccagatta cagaccacct ccaaagctat accettactc
1081 accacaaagc tttttaccag attctaccat tcaaaaacaa aactttatac cacatacatc
1141 attgcaagtt aaaaatagtc agcttctaaa ttctgtatta actttaccat caaggcagac
1201 ctcagctgta ccatcacagc agtatgccac gcaaactgac aaaagacctc ctcctcctcc
1261 ttacaactgt agatatggaa gccagccttt gcaaagtact cagcatatta ctaaacactt
1321 gtctatggaa gttcctcaga gtcgagaaat gctgtcatct gaaataagga ccagctttca
1381 acagcagtgg caaaacccta atgaaaatgt cagcacaatt ggaaatttca ctaacttgaa
1441 agtaaatacc aacagcaaac agccttttaa cagtcccatt agatcttctg tggatggtgt
1501 tcagactctt gctcaaacta atgaagagaa aataatggat tcttgcaatc caacttcaaa
1561 tcaagtactg gacacaagtg ttgcaaaaga aaagctagta agggatatta aaacattagt
1621 agagataaaa cagaagtttt cagaacttgc aaggaaaatt aaaatcaata aagatctttt
1681 gatggcagca ggttgtatta aaatgactaa tacticttat agtgaaccag ctcagaattc
1741 taaattgtct ctaaaacaaa ctgccaaaat ccagtctgga ccccagataa ctccagtaat
1801 gccagagaat gcagagagac aaacaccaac agtagtggaa tctgcagaaa caaataagac
1861 tcaatgtatg ttgaattctg acattcagga agtcaattgc agaaggttta accaagttga
1921 ttctgtttta ccaaatcctg tctattctga aaagcggcca atgccagact catctcatga
1981 tgtgaaagtt ctcacttcaa agacatcagc tgttgagatg acccaggcag tattgaatac
2041 tcagctttca tcagaaaatg ttaccaaagt tgagcaaaat tcaccagcag tttgtgaaac
2101 aatttctgtt cccaagtcca tgtccactga ggaatataaa tcaaaaattc aaaatgaaaa
2161 tatgctactt ctcgctttgc tttcacaggc acgtaagact cagaagacag tattaaaaga
2221 tgctaatcaa actattcagg attctaaacc agacagttgt gaaatgaatc caaataccca
2281 aatgactggt aaccaactga atttgaagaa catggaaact ccaagtactt ctaatgtaag
2341 tggcagggtt ttggacaact ccttttgcag tcgacaagaa tectcaacaa aaggaatgcc
2401 tgctaaaagt gacagtagct gttccatgga agtgctagca acctgtcttt ccctgtggaa
2461 aaagcaacct tcagatactg caaaagaaaa ggagtgtgat aaactcagaa caaacacaac
2521 agcagttgga atttcaaagc ctgctaacat ccacgttaag agtccttgtt cagttgtggg
2581 aaattcaaat tctcagaata aaataagtaa tcccccacag cagacagctt tgtcgatggt
2641 aatgcacaat tatgagtctt caggtataaa tataacaaag ggaacagaac ttcagatagc
2701 tgtagtgtca ccgttagttc tgtcagaggt caaaacattg tctgtcaaag gaataacacc
2761 tgcagtgtta cctgaaacag tgtatcccgt tattaaagaa ggcagtgttt gtagtttaca
2821 aaatcaattg gcagaaaatg caaaggcaac tgctgctttg aaagttgatg ttagtggacc
2881 agtagcaagt acagcaacat caaccaagat ttttccacta actcagaagg aaaagcagaa
2941 tgagtcaact aatggtaatt cagaagtcac acctaatgtc aatcaaggaa agcataacaa
3001 attagagtca gctatccatt ctcctatgaa cgatcagcaa atctcacagg agtcaaggaa
3061 tagtactgtt gtgagtagtg atacattaca gattgacaat atttgttctc tggttgaagg
3121 tgatacctct tacaattccc aaatagcaaa gatattcagc tctcttccct tgaaaatggt
3181 tgagccacag aaaccttctc tacccaatca gcaagggatt ggcagcagag aaccagaaaa
3241 acaattagat aataccactg aaaataaaga ctttggtttt caaaaagata aacctgtaca
3301 gtgcacagat gtttcacata aaatatgtga tcagtcaaag tcagagccac ccttagagtc
3361 atcttttaac aatcttgaaa caaacagagt tattctagag aaaagtagtt tggagcatgc
3421 cactgaaaaa agcacagcta acgatacgtg ctcgtcagct gctattcagg aggatattta
3481 ccctcaggaa atagatgcat ccagcaacta tactccccaa gatcctgcaa gaaatgaaat
3541 ccacagtgat aaggcacctg tcttatacct acatgaccag ctgtcagaac ttctaaaaga
3601 gtttccttat ggcattgagg ctgtgaatac acgtgaaggt tctgtgggcc agcaaactac
3661 ataccagacc tcagaagatc aaactgctga taaaaccagt tctgactcca aagacccagc
3721 agatcaaata caaattacaa tattaagctc agagcaaatg aaagaaatat ttcctgaaca
3781 ggatgatcaa ccctatgtag tagacaagtt ggcagaacct cagaaagaag agcccatcac
3841 agaagtagtt agccagtgtg acctgcaggc acctgcagct ggacaaagtc gtgattctgt
3901 gatactggac tctgagaaag atgatatcca ctgctgtgca ttgggctggc tctccatggt
3961 ttacgaagga gtaccccagt gtcagtgtaa ttccatcaag aactcatctt cagaggaaga
4021 gaaacaaaaa gagcagtgtt ctcctttgga taccaacagt tgtaaacaag gagagagaac
4081 ttctgataga gatgtcactg ttgttcaatt taagagcctt gtaaataatc caaagactcc
4141 tccagatggg aaaagtcatt ttcctgaact acaagacgac agtagaaaag atacacccaa
4201 aacaaaacat aaaagcttac caaggacaga acaagaatta gttgctggtc agttttcatc
4261 taaatgtgat aaactaaatc ccttgcaaaa tcacaaaaga aaaaaattga ggtttcacga
4321 ggtaaccttt cactccagta ataaaatgac agcatcttat gaacaagctt ctcaggaaac
4381 ccgacagaag aaacatgtaa cacagaactc acgtccacta aaaacaaaaa cagctttttt
4441 gccaaataaa gatgtgtata agaagcatag ttctttggga cagtcattat caccagaaaa
4501 gataaaattg aaactcaaat cagttagctt caaacaaaaa cgaaagttag accaagggaa
4561 cgtattagat atggaagtaa agaaaaagaa acatgataaa caagaacaga aaggaagtgt
4621 gggagctaca ttcaaattag gtgactcttt gtcaaaccca aacgaaagag ccattgttaa
4681 agaaaagatg gtatcaaata ctaagtctgt agacacgaaa gcgagttcat ctaaatttag
4741 tagaattcta actcctaagg agtatttaca aaggcagaag cataaagaag ctctgagtaa
4801 taaagcatcg aagaaaatct gtgtgaaaaa cgtgccatgt gattctgaac atatgagacc
4861 aagtaaactt gccgtgcagg ttgaaagttg tgggaaatca aatgagaaac acagcagcgg
4921 cgtgcagacc tctaaagaat cattaaatgg cttgacaagc catggtaaaa acctcaaaat
4981 ccaccattct caggagtcta aaacatacaa cattctaagg aatgttaaag aaaaagttgg
5041 tgggaagcag cctgataaaa tatggattga taagactaaa ttagacaaat taaccaatat
5101 aagcaacgaa gctcaattca gccaaatgcc tccccaagta aaggatcaaa agaaattata
5161 tctgaataga gttgggttta aatgcactga acgtgaaagc atttctctca ccaaattaga
5221 aagttcaccc aggaagcttc ataaagataa gagacaggaa aataaacata agaccttttt
5281 accggtgaaa ggtaacacag aaaaatcaaa catgctggag tttaaattat gtccagatat
5341 cttactaaag aatacaaact ctgtggaaga acggaaggat gtaaagcctc atcctaggaa
5401 ggagcaagcc cctctgcaag tttcaggaat aaaaagtaca aaagaagact ggttaaaatt
5461 tgttgctaca aagaaaagga cacagaaaga cagccaagag agagataatg ttaattcaag
5521 actctcgaag agaagcttca gtgcagatgg atttgagatg ctacaaaacc cagtaaaaga
5581 ttcaaaagaa atgtttcaaa cctacaaaca gatgtacctg gagaagagaa gcagaagcct
5641 tggtagcagt cctgtaaaat aattacaaga tgtggttttg taattgccac tgggaaattt
5701 ctttcctttt ctgttcaaaa tatttcgctg aaactaatga gaaatgccat gataaagatt
5761 tctcagagtt tggttcccac tttcattgta tttcattgaa agtgcttaat taaaatggct
5821 tgagaacttt gggtagccat gtgtaagaaa tggatggtat tcaccgggga aacaaggtat
5881 ttgaatttct actttattga accagattta ccattatttt aaaaggaatg cttatacaaa
5941 tcaatttgaa attctaccca tcttgaggga ggaccgttcc tcagttaagg acttgtttat
6001 ttaaatggga ctgtaaatat gttttggttt ctaagctata ttagcaaaat ttatttttca
6061 aaaatgccca ctgtgatgtg aatgtcaaaa tatattctta agtgttttat aactaattgt
6121 aaactttttt tcagaagtct tattttatac ttgtgaaact gaacacaatt ttgggacaac
6181 gtttaaacat tacttttcat acttgaaata aacatttatt ttttaaaaaa ctaa
(SEQ ID NO: 217)
MNWNEKPKSATLPPLYPKSQPPFLHQSLINQITTTSQSSFSYPGSNQEACMYPGNSNPISQPLLNIQNYPQQI
SVSDMHNGTVVASHTSVERITYANVNGPKQLTHNLQMSSGVTQNVWLNSPMRNPVHSHIGATVSHQTDFGANV
PNMPALQSQLITSDTYSMQMQMIPSNSTRLPVAYQGNQGLNQSFSEQQVDWTQQCISKGLTYPDYRPPPKLYR
YSPQSFLPDSTIQKQNFIPHTSLQVKNSQLLNSVLTLPSRQTSAVPSQQYATQTDKRPPPPPYNCRYGSQPLQ
STQHITKHLSMEVPQSREMLSSEIRTSFQQQWQNPNENVSTIGNFTNLKVNTNSKQPENSPIRSSVDGVQTLA
QTNEEKIMDSCNPTSNQVLDTSVAKEKLVRDIKTLVEIKQKFSELARKIKINKDLLMAAGCIKMTNTSYSEPA
QNSKLSLKQTAKIQSGPQITPVMPENAERQTPTVVESAETNKTQCMLNSDIQEVNCRRFNQVDSVLPNPVYSE
KRPMPDSSHDVKVLTSKTSAVEMTQAVLNTQLSSENVTKVEQNSPAVCETISVPKSMSTEEYKSKIQNENMLL
LALLSQARKTQKTVLKDANQTIQDSKPDSCEMNPNTQMTGNQLNLKNMETPSTSNVSGRVLDNSFCSGQESST
KGMPAKSDSSCSMEVLATCLSLWKKQPSDTAKEKECDKLRTNTTAVGISKPANIHVKSPCSVVGNSNSQNKIS
NPSQQTALSMVMHNYESSGINITKGTELQIAVVSPLVLSEVKTLSVKGITPAVLPETVYPVIKEGSVCSLQNQ
LAENAKATAALKVDVSGPVASTATSTKIFPLTQKEKQNESTNGNSEVTPNVNQGKHNKLESAIHSPMNDQQIS
QESRNSTVVSSDTLQIDNICSLVEGDTSYNSQIAKIFSSLPLKMVEPQKPSLPNQQGIGSREPEKQLDNTTEN
KDFGFQKDKPVQCTDVSHKICDQSKSEPPLESSENNLETNRVILEKSSLEHATEKSTANDTCSSAAIQEDIYP
QEIDASSNYTPQDPARNEIHSDKAPVLYLHDQLSELLKEFPYGIEAVNTREGSVGQQTTYQTSEDQTADKTSS
DSKDPADQIQITILSSEQMKEIFPEQDDQPYVVDKLAEPQKEEPITEVVSQCDLQAPAAGQSRDSVILDSEKD
DIHCCALGWLSMVYEGVPQCQCNSIKNSSSEEEKQKEQCSPLDTNSCKQGERTSDRDVTVVQFKSLVNNPKTP
PDGKSHFPELQDDSRKDTPKTKHKSLPRTEQELVAGQFSSKCDKLNPLQNHKRKKLRFHEVTFHSSNKMTASY
EQASQETRQKKHVTQNSRPLKTKTAFLPNKDVYKKHSSLGQSLSPEKIKLKLKSVSFKQKRKLDQGNVLDMEV
KKKKHDKQEQKGSVGATFKLGDSLSNPNERAIVKEKMVSNTKSVDTKASSSKFSRILTPKEYLQRQKHKEALS
NKASKKICVKNVPCDSEHMRPSKLAVQVESCGKSNEKHSSGVQTSKESLNGLTSHGKNLKIHHSQESKTYNIL
RNVKEKVGGKQPDKIWIDKTKLDKLTNISNEAQFSQMPPQVKDQKKLYLNRVGFKCTERESISLTKLESSPRK
LHKDKRQENKHKTFLPVKGNTEKSNMLEFKLCPDILLKNTNSVEERKDVKPHPRKEQAPLQVSGIKSTKEDWL
KFVATKKRTQKDSQERDNVNSRLSKRSFSADGFEMLQNPVKDSKEMFQTYKQMYLEKRSRSLGSSPVK
```

[0169] Any of these genes or the proteins encoded by these genes that are described herein can regulate T cell exhaustion/dysfunction resistance.

[0170] The sequences provided herein are exemplary. Isoforms and variants of these sequences and of any of regulators listed in Table 1 or FIGS. 1-27 can also be used in the methods and compositions described herein.

[0171] For example, isoforms and variants of the proteins and nucleic acids can be used in the methods and compositions described herein when they are substantially identical to the genes, or the encoded proteins listed in Table 1 or FIGS. 1-27. The phrase “substantially identical” indicates that a polypeptide or nucleic acid comprises a sequence with between 55-100% sequence identity to a reference sequence, for example with at least 55% sequence identity, at least 60%, at least 70%, at least 80%, at least 90%, at least 95%, at least 96%, at least 97%, at least 98%, at least 99% sequence identity to a reference sequence over a specified comparison window. Optimal alignment may be ascertained or conducted using the homology alignment algorithm of Needleman and Wunsch, J. Mol. Biol. 48:443-53 (1970).

[0172] An indication that two polypeptide sequences are substantially identical is that both polypeptides have the same function—acting as a regulator of T cell exhaustion/dysfunction resistance. The polypeptide that is substantially identical to a regulator sequence and may not have 50 exactly the same level of activity as the regulator. Instead, the substantially identical polypeptide may exhibit greater or lesser levels of regulator activity than the those listed in Table 1 or FIGS. 1-27, or any of the sequences recited herein. For example, the substantially identical polypeptide or nucleic acid may have at least about 40%, or at least about 50%, or at least about 60%, or at least about 70%, or at least about 80%, or at least about 90%, or at least about 95%, or at least about 97%, or at least about 98%, or at least about 100%, or at least about 105%, or at least about 110%, or at least about 120%, or at least about 130%, or at least about 140%, or at least about 150%, or at least about 200% of the activity of a regulator described herein when measured by similar assay procedures.

[0173] Alternatively, substantial identity is present when a second polypeptide is immunologically reactive with antibodies raised against the first polypeptide (e.g., a polypeptide encoded by any of the genes listed in Table 1 or FIGS. 1-27). Thus, a polypeptide is substantially identical to a first polypeptide, for example, where the two polypeptides differ only by a conservative substitution. In addition, a polypeptide can be substantially identical to a first polypeptide when they differ by a non-conservative change if the epitope that the antibody recognizes is substantially identical. Polypeptides that are “substantially similar” share sequences as noted above except that some residue positions, which are not identical, may differ by conservative amino acid changes.

### Expression Systems

[0174] Nucleic acid segments encoding one or more regulator proteins, or nucleic acid segments that are inhibitory nucleic acids or such regulators, can be inserted into or employed with any suitable expression system. Nucleic acids segments encoding one or more agents that can modulate a regulator protein expression or activity can be inserted into or employed with any suitable expression system. A therapeutically effective quantity of one or more regulator proteins or modulators of such regulator proteins can be generated from such expression systems. A therapeutically effective of one or more inhibitory nucleic acids can also be generated from such expression systems.

[0175] Recombinant expression of nucleic acids (or inhibitory nucleic acids) is usually accomplished using a vector, such as a plasmid. The vector can include a promoter operably linked to nucleic acid segment encoding one or more regulator/modulator proteins. In another example, a vector can include a promoter operably linked to nucleic acid segment that encodes a regulator/modulator inhibitory nucleic acid.

[0176] The vector can also include other elements required for transcription and translation. As used herein, vector refers to any carrier containing exogenous DNA. Thus, vectors are agents that transport the exogenous nucleic acid into a cell without degradation and include a promoter yielding expression of the nucleic acid in the cells into which it is delivered. Vectors include but are not limited to plasmids, viral nucleic acids, viruses, phage nucleic acids, phages, cosmids, and artificial chromosomes. A variety of prokaryotic and eukaryotic expression vectors suitable for carrying, encoding and/or expressing a regulator/modulator can be employed. A variety of prokaryotic and eukaryotic expression vectors suitable for carrying, encoding and/or expressing regulator/modulator inhibitory nucleic acids can be employed. Such expression vectors include, for example, pET, pET3d, pCR2.1, pBAD, pUC, and yeast vectors. The vectors can be used, for example, in a variety of in vivo, ex vivo and/or in vitro situations.

[0177] The expression cassette, expression vector, and sequences in the cassette or vector can be heterologous. As used herein, the term “heterologous” when used in reference to an expression cassette, expression vector, regulatory sequence, promoter, or nucleic acid refers to an expression cassette, expression vector, regulatory sequence, or nucleic acid that has been manipulated in some way. For example, a heterologous promoter can be a promoter that is not naturally linked to a nucleic acid of interest, or that has been introduced into cells by cell transformation procedures. A heterologous nucleic acid or promoter also includes a nucleic acid or promoter that is native to an organism but that has been altered in some way (e.g., placed in a different chromosomal location, mutated, added in multiple copies, linked to a non-native promoter or enhancer sequence, etc.). Heterologous nucleic acids may comprise sequences that comprise cDNA forms; the cDNA sequences may be expressed in either a sense (to produce mRNA) or anti-sense orientation (to produce an anti-sense RNA transcript that is complementary to the mRNA transcript). Heterologous coding regions can be distinguished from endogenous coding regions, for example, when the heterologous coding regions are joined to nucleotide sequences comprising regulatory elements such as promoters that are not found naturally associated with the coding region, or when the heterologous coding regions are associated with portions of a chromosome not found in nature (e.g., genes expressed in loci where the protein encoded by the coding region is not normally expressed). Similarly, heterologous promoters can be promoters that at linked to a coding region to which they are not linked in nature.

[0178] Viral vectors that can be employed include those relating to lentivirus, adenovirus, adeno-associated virus, herpes virus, vaccinia virus, polio virus, AIDS virus, neuronal trophic virus, Sindbis and other viruses. Also useful are any viral families which share the properties of these viruses which make them suitable for use as vectors. Retroviral vectors that can be employed include those described in by Verma, I. M., Retroviral vectors for gene transfer. In Microbiology-1985, American Society for Microbiology, pp. 229-232, Washington, (1985). For example, such retroviral vectors can include Murine Maloney Leukemia virus, MMLV, and other retroviruses that express desirable properties. Typically, viral vectors contain, nonstructural early genes, structural late genes, an RNA polymerase III transcript, inverted terminal repeats necessary for replication and encapsidation, and promoters to control the transcription and replication of the viral genome. When engineered as vectors, viruses typically have one or more of the early genes removed and a gene or gene/promoter cassette is inserted into the viral genome in place of the removed viral nucleic acid.

[0179] A variety of regulatory elements can be included in the expression cassettes and/or expression vectors, including promoters, enhancers, translational initiation sequences, transcription termination sequences and other elements. A “promoter” is generally a sequence or sequences of DNA that function when in a relatively fixed location in regard to the transcription start site. For example, the promoter can be upstream of the nucleic acid segment encoding a regulator protein. In another example, the promoter can be upstream of an inhibitory nucleic acid segment of a modulating agent for one or more regulators.

[0180] A “promoter” contains core elements required for basic interaction of RNA polymerase and transcription factors and can contain upstream elements and response elements. “Enhancer” generally refers to a sequence of DNA that functions at no fixed distance from the transcription start site and can be either 5′ or 3′ to the transcription unit. Furthermore, enhancers can be within an intron as well as within the coding sequence itself. They are usually between 10 and 300 by in length, and they function in cis. Enhancers function to increase transcription from nearby promoters. Enhancers, like promoters, also often contain response elements that mediate the regulation of transcription. Enhancers often determine the regulation of expression.

[0181] Expression vectors used in eukaryotic host cells (yeast, fungi, insect, plant, animal, human or nucleated cells) can also contain sequences for the termination of transcription, which can affect mRNA expression. These regions are transcribed as polyadenylated segments in the untranslated portion of the mRNA encoding tissue factor protein. The 3′ untranslated regions also include transcription termination sites. It is preferred that the transcription unit also contains a polyadenylation region. One benefit of this region is that it increases the likelihood that the transcribed unit will be processed and transported like mRNA. The identification and use of polyadenylation signals in expression constructs is well established. It is preferred that homologous polyadenylation signals be used in the transgene constructs.

[0182] The expression of regulator/modulator proteins or inhibitory nucleic acid molecules therefor from an expression cassette or expression vector can be controlled by any promoter capable of expression in prokaryotic cells or eukaryotic cells. Examples of prokaryotic promoters that can be used include, but are not limited to, SP6, T7, T5, tac, bla, trp, gal, lac, or maltose promoters. Examples of eukaryotic promoters that can be used include, but are not limited to, constitutive promoters, e.g., viral promoters such as CMV, SV40 and RSV promoters, as well as regulatable promoters, e.g., an inducible or repressible promoter such as the tet promoter, the hsp70 promoter and a synthetic promoter regulated by CRE. Vectors for bacterial expression include pGEX-5X-3, and for eukaryotic expression include pCIneo-CMV.

[0183] The expression cassette or vector can include nucleic acid sequence encoding a marker product. This marker product is used to determine if the gene has been delivered to the cell and once delivered is being expressed. Marker genes can include the E. coli lacZ gene which encodes β-galactosidase, and green fluorescent protein. In some embodiments the marker can be a selectable marker. When such selectable markers are successfully transferred into a host cell, the transformed host cell can survive if placed under selective pressure. There are two widely used distinct categories of selective regimes. The first category is based on a cell's metabolism and the use of a mutant cell line which lacks the ability to grow independent of a supplemented media. The second category is dominant selection which refers to a selection scheme used in any cell type and does not require the use of a mutant cell line. These schemes typically use a drug to arrest growth of a host cell. Those cells which have a novel gene would express a protein conveying drug resistance and would survive the selection. Examples of such dominant selection use the drugs neomycin (Southern P. and Berg, P., J. Molec. Appl. Genet. 1: 327 (1982)), mycophenolic acid. (Mulligan, R. C. and Berg, P. Science 209: 1422 (1980)) or hygromycin. (Sugden. B. et al., Mol. Cell. Biol. 5: 410-413 (1985)).

[0184] Gene transfer can be obtained using direct transfer of genetic material, in but not limited to, plasmids, viral vectors, viral nucleic acids, phage nucleic acids, phages, cosmids, and artificial chromosomes, or via transfer of genetic material in cells or carriers such as cationic liposomes. Such methods are well known in the art and readily adaptable for use in the method described herein. Transfer vectors can be any nucleotide construction used to deliver genes into cells (e.g., a plasmid), or as part of a general strategy to deliver genes, e.g., as part of recombinant retrovirus or adenovirus (Ram et al. Cancer Res. 53:83-88, (1993)). Appropriate means for transfection, including viral vectors, chemical transfectants, or physico-mechanical methods such as electroporation and direct diffusion of DNA, are described by, for example, Wolff, J. A., et al., Science, 247, 1465-1468, (1990); and Wolff, J. A. Nature, 352, 815-818, (1991).

[0185] For example, the nucleic acid molecules, expression cassette and/or vectors encoding regulator/modulator proteins or encoding inhibitory nucleic acid molecules therefor can be introduced to a cell by any method including, but not limited to, calcium-mediated transformation, electroporation, microinjection, lipofection, particle bombardment and the like. The cells can be expanded in culture and then administered to a subject, e.g., a mammal such as a human. The amount or number of cells administered can vary but amounts in the range of about 10⁶ to about 10⁹ cells can be used. The cells are generally delivered in a physiological solution such as saline or buffered saline. The cells can also be delivered in a vehicle such as a population of liposomes, exosomes or microvesicles.

[0186] In some cases, the transgenic cell can produce exosomes or microvesicles that contain nucleic acid molecules, expression cassettes and/or vectors encoding one or more regulator/modulator. In some cases, the transgenic cell can produce exosomes or microvesicles that contain inhibitory nucleic acid molecules that can target regulator/modulator nucleic acids, one or more nucleic acids for regulator, or a combination thereof. Microvesicles can mediate the secretion of a wide variety of proteins, lipids, mRNAs, and micro RNAs, interact with neighboring cells, and can thereby transmit signals, proteins, lipids, and nucleic acids from cell to cell (see, e.g., Shen et al., J Biol Chem. 286(16): 14383-14395 (2011); Hu et al., Frontiers in Genetics 3 (April 2012); Pegtel et al., Proc. Nat'l Acad Sci 107(14): 6328-6333 (2010); WO/2013/084000; each of which is incorporated herein by reference in its entirety. Cells producing such microvesicles can be used to express the one or more regulator/modulator protein and/or inhibitory nucleic acids for one or more regulator/modulators, or a combination thereof.

[0187] Transgenic vectors or cells with a heterologous expression cassette or expression vector can express one or more regulator, can optionally also express one or more regulator inhibitory nucleic acids, or a combination thereof. Any of these vectors or cells can be administered to a subject. Exosomes produced by transgenic cells can be used to administer regulator/modulator proteins, regulator/modulator nucleic acids, regulator/modulator inhibitory nucleic acids, or a combination thereof to a subject or to tumor and cancer cells in the subject.

[0188] Methods and compositions that include inhibitors of one or regulators such as inhibitory nucleic acids, antibodies, or any combination thereof.

### Crispr Modifications

[0189] In some cases, clustered regularly interspaced short palindromic repeats (CRISPR)/CRISPR-associated (Cas) systems can be used to create one or more modifications in regulator genes. Such CRISPR modifications can reduce or activate the expression or functioning of the regulator gene products. CRISPR/Cas systems are useful, for example, for RNA-programmable genome editing (see e.g., Marraffini and Sontheimer. Nature Reviews Genetics 11: 181-190 (2010); Sorek et al. Nature Reviews Microbiology 2008 6: 181-6; Karginov and Hannon. Mol Cell 2010 1:7-19: Hale et al. Mol Cell 2010:45:292-302: Jinek et al. Science 2012 337:815-820; Bikard and Marraffini Curr Opin Immunol 2012 24:15-20: Bikard et al. Cell Host & Microbe 2012 12: 177-186; all of which are incorporated by reference herein in their entireties).

[0190] A CRISPR guide RNA can be used that can target a Cas enzyme to the desired location in the genome, where it can cleave the genomic DNA for generation of a genomic modification. This technique is described, for example, by Mali et al. Science 2013 339:823-6; which is incorporated by reference herein in its entirety. Kits for the design and use of CRISPR-mediated genome editing are commercially available, e.g., the PRECISION X CAS9 SMART NUCLEASE™ System (Cat No. CAS900A-1) from System Biosciences, Mountain View, CA.

[0191] In some cases, transcriptional activators can be linked to defective Cas9 or to one or more guide RNAs to target the transcriptional activator. Such transcriptional activators include protein domains or whole proteins that assist in the recruitment of co-factors and RNA Polymerase to increase transcription of one or more of the regulator gene(s) listed in Table 1 or FIGS. 1-27.

[0192] In some cases, a cre-lox recombination system of bacteriophage P1, described by Abremski et al. 1983. Cell 32:1301 (1983), Steinberg et al., Cold Spring Harbor Symposia on Quantitative Biology, Vol. XLV 297 (1981) and others, can be used to promote recombination and alteration of the regulator genomic site(s). The cre-lox system utilizes the cre recombinase isolated from bacteriophage P1 in conjunction with the DNA sequences that the recombinase recognizes (termed lox sites). This recombination system has been effective for achieving recombination in plant cells (see, e.g., U.S. Pat. No. 5,658,772), animal cells (U.S. Pat. Nos. 4,959,317 and 5,801,030), and in viral vectors (Hardy et al., J. Virology 71:1842 (1997).

[0193] The genomic mutations so incorporated can alter one or more amino acids in the encoded regulator gene products. For example, genomic sites modified so that the encoded regulator protein is more prone to degradation, is less stable so that the half-life of such protein(s) is reduced, or so that the regulator has improved expression or functioning. In another example, genomic sites can be modified so that at least one amino acid of a regulator polypeptide is deleted or mutated to alter its activity. For example, a conserved amino acid or a conserved domain can be modified to improve or reduce of the activity of the regulator polypeptide. For example, a conserved amino acid or several amino acids in a conserved domain of the regulator polypeptide can be replaced with one or more amino acids having physical and/or chemical properties that are different from the conserved amino acid(s). For example, to change the physical and/or chemical properties of the conserved amino acid(s), the conserved amino acid(s) can be deleted or replaced by amino acid(s) of another class, where the classes are identified in the following table.

| Classification | Genetically Encoded |
|---|---|
| Hydrophobic | A, G, F, I, L, M, P, V, W |
| Aromatic | F, Y, W |
| Apolar | M, G, P |
| Aliphatic | A, V, L, I |
| Hydrophilic | C, D, E, H, K, N, Q, R, S, T, Y |
| Acidic | D, E |
| Basic | H, K, R |
| Polar | Q, N, S, T, Y |
| Cysteine-Like | C |

[0194] The guide RNAs and nuclease can be introduced via one or more vehicles such as by one or more expression vectors (e.g., viral vectors), virus like particles, ribonucleoproteins (RNPs), via nanoparticles, liposomes, or a combination thereof. The vehicles can include components or agents that can target particular cell types (e.g., antibodies that recognize cell-surface markers), facilitate cell penetration, reduce degradation, or a combination thereof.

### Inhibitory Nucleic Acids

[0195] The expression of one or more regulators/modulators can be inhibited, for example by use of an inhibitory nucleic acid that specifically recognizes a nucleic acid that encodes the regulator or modulator.

[0196] An inhibitory nucleic acid can have at least one segment that will hybridize to a regulator nucleic acid or modulator under intracellular or stringent conditions. The inhibitory nucleic acid can reduce expression of a regulator/modulator nucleic acid. A nucleic acid may hybridize to a genomic DNA, a messenger RNA, or a combination thereof. An inhibitory nucleic acid may be incorporated into a plasmid vector or viral DNA. It may be single stranded or double stranded, circular or linear.

[0197] As an example, an inhibitory nucleic acid is a polymer of ribose nucleotides or deoxyribose nucleotides having more than 13 nucleotides in length. An inhibitory nucleic acid may include naturally occurring nucleotides; synthetic, modified, or pseudo-nucleotides such as phosphorothiolates; as well as nucleotides having a detectable label such as P³², biotin or digoxigenin. An inhibitory nucleic acid can reduce the expression and/or activity of a regulator/modulator nucleic acid. Such an inhibitory nucleic acid may be completely complementary to a segment of an endogenous regulator/modulator nucleic acid (e.g., an RNA). Alternatively, some variability is permitted in the inhibitory nucleic acid sequences relative to regulator/modulator sequences. An inhibitory nucleic acid can hybridize to a regulator/modulator nucleic acid under intracellular conditions or under stringent hybridization conditions and is sufficiently complementary to inhibit expression of the endogenous regulator/modulator nucleic acid. Intracellular conditions refer to conditions such as temperature, pH and salt concentrations typically found inside a cell, e.g., an animal or mammalian cell. One example of such an animal or mammalian cell is a myeloid progenitor cell. Another example of such an animal or mammalian cell is a more differentiated cell derived from a myeloid progenitor cell. Generally, stringent hybridization conditions are selected to be about 5° C. lower than the thermal melting point (Tm) for the specific sequence at a defined ionic strength and pH. However, stringent conditions encompass temperatures in the range of about PC to about 20° C. lower than the thermal melting point of the selected sequence, depending upon the desired degree of stringency as otherwise qualified herein. Inhibitory oligonucleotides that comprise, for example, 2, 3, 4, or 5 or more stretches of contiguous nucleotides that are precisely complementary to a regulator/modulator coding sequence, each separated by a stretch of contiguous nucleotides that are not complementary to adjacent coding sequences, can inhibit the function of one or more nucleic acids for any of the regulators or modulators described herein. In general, each stretch of contiguous nucleotides is at least 4, 5, 6, 7, or 8 or more nucleotides in length. Non-complementary intervening sequences may be 1, 2, 3, or 4 nucleotides in length. One skilled in the art can easily use the calculated melting point of an inhibitory nucleic acid hybridized to a sense nucleic acid to estimate the degree of mismatching that will be tolerated for inhibiting expression of a particular target nucleic acid. Inhibitory nucleic acids of the invention include, for example, a short hairpin RNA, a small interfering RNA, a ribozyme or an antisense nucleic acid molecule.

[0198] The inhibitory nucleic acid molecule may be single or double stranded (e.g., a small interfering RNA (siRNA)) and may function in an enzyme-dependent manner or by steric blocking. Inhibitory nucleic acid molecules that function in an enzyme-dependent manner include forms dependent on RNase H activity to degrade target mRNA. These include single-stranded DNA, RNA, and phosphorothioate molecules, as well as the double-stranded RNAi/siRNA system that involves target mRNA recognition through sense-antisense strand pairing followed by degradation of the target mRNA by the RNA-induced silencing complex. Steric blocking inhibitory nucleic acids, which are RNase-H independent, interfere with gene expression or other mRNA-dependent cellular processes by binding to a target mRNA and getting in the way of other processes. Steric blocking inhibitory nucleic acids include 2′-O alkyl (usually in chimeras with RNase-H dependent antisense), peptide nucleic acid (PNA), locked nucleic acid (LNA) and morpholino antisense.

[0199] Small interfering RNAs, for example, may be used to specifically reduce translation of regulator/modulator such that translation of the encoded regulator/modulator polypeptide is reduced. SiRNAs mediate post-transcriptional gene silencing in a sequence-specific manner. See, for example, website at invitrogen.com/site/us/en/home/Products-and-Services/Applications/rnai.html. Once incorporated into an RNA-induced silencing complex, siRNA mediate cleavage of the homologous endogenous mRNA transcript by guiding the complex to the homologous mRNA transcript, which is then cleaved by the complex. The siRNA may be homologous and/or complementary to any region of the regulator/modulator transcript and/or any of the transcripts of the regulators/modulators. The region of homology may be 30 nucleotides or less in length, preferable less than 25 nucleotides, and more preferably about 21 to 23 nucleotides in length. SiRNA is typically double stranded and may have two-nucleotide 3′ overhangs, for example, 3′ overhanging UU dinucleotides. Methods for designing siRNAs are known to those skilled in the art. See, for example, Elbashir et al. Nature 411: 494-498 (2001); Harborth et al. Antisense Nucleic Acid Drug Dev. 13: 83-106 (2003).

[0200] The pSuppressorNeo vector for expressing hairpin siRNA, commercially available from IMGENEX (San Diego, California), can be used to generate siRNA for inhibiting expression of regulators/modulators. The construction of the siRNA expression plasmid involves the selection of the target region of the mRNA, which can be a trial-and-error process. However, Elbashir et al. have provided guidelines that appear to work ˜80% of the time. Elbashir, S. M., et al., Analysis of gene function in somatic mammalian cells using small interfering RNAs. Methods, 2002. 26(2): p. 199-213. Accordingly, for synthesis of synthetic siRNA, a target region may be selected preferably 50 to 100 nucleotides downstream of the start codon. The 5′ and 3′ untranslated regions and regions close to the start codon should be avoided as these may be richer in regulatory protein binding sites. As siRNA can begin with AA, have 3′ UU overhangs for both the sense and antisense siRNA strands, and have an approximate 50% G/C content. An example of a sequence for a synthetic siRNA is 5′-AA(N19)UU, where N is any nucleotide in the mRNA sequence and should be approximately 50% G-C content. The selected sequence(s) can be compared to others in the human genome database to minimize homology to other known coding sequences (e.g., by Blast search, for example, through the NCBI website).

[0201] SiRNAs may be chemically synthesized, created by in vitro transcription, or expressed from an siRNA expression vector or a PCR expression cassette. See, e.g., website at invitrogen.com/site/us/en/home/Products-and-Services/Applications/mai.html. When an siRNA is expressed from an expression vector or a PCR expression cassette, the insert encoding the siRNA may be expressed as an RNA transcript that folds into an siRNA hairpin. Thus, the RNA transcript may include a sense siRNA sequence that is linked to its reverse complementary antisense siRNA sequence by a spacer sequence that forms the loop of the hairpin as well as a string of U's at the 3′ end. The loop of the hairpin may be of any appropriate lengths, for example, 3 to 30 nucleotides in length, preferably, 3 to 23 nucleotides in length, and may be of various nucleotide sequences including, AUG, CCC, UUCG, CCACC, CTCGAG, AAGCUU, CCACACC and UUCAAGAGA. SiRNAs also may be produced in vivo by cleavage of double-stranded RNA introduced directly or via a transgene or virus. Amplification by an RNA-dependent RNA polymerase may occur in some organisms.

[0202] An inhibitory nucleic acid such as a short hairpin RNA siRNA or an antisense oligonucleotide may be prepared using methods such as by expression from an expression vector or expression cassette that includes the sequence of the inhibitory nucleic acid. Alternatively, it may be prepared by chemical synthesis using naturally occurring nucleotides, modified nucleotides or any combinations thereof. In some embodiments, the inhibitory nucleic acids are made from modified nucleotides or non-phosphodiester bonds, for example, that are designed to increase biological stability of the inhibitory nucleic acid or to increase intracellular stability of the duplex formed between the inhibitory nucleic acid and the target regulators/modulators nucleic acids.

[0203] An inhibitory nucleic acid may be prepared using available methods, for example, by expression from an expression vector encoding a complementarity sequence of the regulator/modulator nucleic acids described herein. Alternatively, it may be prepared by chemical synthesis using naturally occurring nucleotides, modified nucleotides or any mixture of combination thereof. In some embodiments, the nucleic acids of the regulators/modulators described herein are made from modified nucleotides or non-phosphodiester bonds, for example, that are designed to increase biological stability of the nucleic acids or to increase intracellular stability of the duplex formed between the inhibitory nucleic acids and other (e.g., endogenous) nucleic acids.

[0204] For example, the regulator/modulator nucleic acids can be peptide nucleic acids that have peptide bonds rather than phosphodiester bonds.

[0205] Naturally occurring nucleotides that can be employed in the regulator/modulator nucleic acids include the ribose or deoxyribose nucleotides adenosine, guanine, cytosine, thymine and uracil. Examples of modified nucleotides that can be employed in the regulators/modulator nucleic acids include 5-fluorouracil, 5-bromouracil, 5-chlorouracil, 5-iodouracil, hypoxanthine, xanthine, 4-acetylcytosine, 5-(carboxyhydroxylmethyl) uracil, 5-carboxymethylaminomethyl-2-thiouridine, 5-carboxymethylaminomethyluracil, dihydrouracil, beta-D-galactosylqueosine, inosine, N6-isopentenyladenine, 1-methylguanine, 1-methylinosine, 2,2-dimethylguanine, 2-methyladenine, 2-methylguanine, 3-methylcytosine, 5-methylcytosine, N6-adenine, 7-methylguanine, 5-methylaminomethyluracil, 5-methoxyaminomethyl-2-thiouracil, beta-D-mannosylqueosine, 5′-methoxycarboxymethyluracil, 5-methoxyuracil. 2-methylthio-N6-isopentenyladenine, uracil-5oxyacetic acid, wybutoxosine, pseudouracil, queosine, 2-thiocytosine, 5-methyl-2-thiouracil, 2-thiouracil, 4-thiouracil, 5-methyluracil, uracil-5-oxacetic acid methylester, uracil-5-oxacetic acid, 5-methyl-2-thiouracil, 3-(3-amino-3-N-2-carboxypropyl) uracil, (acp3)w, and 2,6-diaminopurine.

[0206] Thus, inhibitory nucleic acids of the regulators/modulators described herein may include modified nucleotides, as well as natural nucleotides such as combinations of ribose and deoxyribose nucleotides. The inhibitory nucleic acids and may be of same length as wild type regulators/modulators described herein. The inhibitory nucleic acids of the regulators/modulators described herein can also be longer and include other useful sequences. In some embodiments, the inhibitory nucleic acids of the regulators/modulators described herein are somewhat shorter. For example, inhibitory nucleic acids of the regulators-/modulators described herein can include a segment that has a nucleic acid sequence that can be missing up to 5 nucleotides, or missing up to 10 nucleotides, or missing up to 20 nucleotides, or missing up to 30 nucleotides, or missing up to 50 nucleotides, or missing up to 100 nucleotides from the 5′ or 3′ end.

### Antibodies

[0207] Antibodies can be used as inhibitors or activators of any of the regulators/modulators described herein. For example, in some cases, antibody preparations can target one or more of the regulators or modulators described herein to block interactions by the regulators/modulators described herein or to reduce the activities or the regulators/modulators. In other cases, for example, antibodies can activate one or more of the regulator or modulators described herein that are cell surface receptors. One example of such activation is Varlilumab (a CD27 activating antibody) currently in clinical trial and that has been shown to increase anti-tumor T cell function Ansell et al. (2020) Blood Adv. 4(9): 1917-1926.

[0208] Antibodies can be raised against various epitopes of the regulators/modulators described herein. Some antibodies for regulators/modulators described herein may also be available commercially. However, the antibodies contemplated for treatment pursuant to the methods and compositions described herein are preferably human or humanized antibodies and are highly specific for their targets.

[0209] In one aspect, the present disclosure relates to use of isolated antibodies that bind specifically to regulators/modulators described herein. Such antibodies may be monoclonal antibodies. Such antibodies may also be humanized or fully human monoclonal antibodies. The antibodies can exhibit one or more desirable functional properties, such as high affinity binding to one or more regulators/modulators described herein, or the ability to inhibit functioning of any of the regulators/modulators described herein.

[0210] Methods and compositions described herein can include antibodies that bind any of the regulators/modulators described herein, or a combination of antibodies where each antibody type can separately bind one of the regulators/modulators described herein.

[0211] The term “antibody” as referred to herein includes whole antibodies and any antigen binding fragment (i.e., “antigen-binding portion”) or single chains thereof. An “antibody” refers to a glycoprotein comprising at least two heavy (H) chains and two light (L) chains inter-connected by disulfide bonds, or an antigen binding portion thereof. Each heavy chain is comprised of a heavy chain variable region (abbreviated herein as V_{H}) and a heavy chain constant region. The heavy chain constant region is comprised of three domains, C_{H1}, C_{H2} and C_{H3}. Each light chain is comprised of a light chain variable region (abbreviated herein as V_{L}) and a light chain constant region. The light chain constant region is comprised of one domain, C_{L}. The V_{H} and V_{L} regions can be further subdivided into regions of hypervariability, termed complementarity determining regions (CDR), interspersed with regions that are more conserved, termed framework regions (FR). Each V_{H} and V_{L} is composed of three CDRs and four FRs, arranged from amino-terminus to carboxy-terminus in the following order: FR1, CDR1, FR2, CDR2, FR3, CDR3, FR4. The variable regions of the heavy and light chains contain a binding domain that interacts with an antigen. The constant regions of the antibodies may mediate the binding of the immunoglobulin to host tissues or factors, including various cells of the immune system (e.g., effector cells) and the first component (C1q) of the classical complement system.

[0212] The term “antigen-binding portion” of an antibody (or simply “antibody portion”), as used herein, refers to one or more fragments of an antibody that retain the ability to specifically bind to an antigen (e.g., a peptide or domain of any of the regulators/modulators described herein). It has been shown that the antigen-binding function of an antibody can be performed by fragments of a full-length antibody. Examples of binding fragments encompassed within the term “antigen-binding portion” of an antibody include (i) a Fab fragment, a monovalent fragment consisting of the V_{L}, V_{H}, C_{L} and C_{H1} domains; (ii) a F(ab′)₂ fragment, a bivalent fragment comprising two Fab fragments linked by a disulfide bridge at the hinge region; (iii) a Fd fragment consisting of the V_{H} and CHI domains; (iv) a Fv fragment consisting of the V_{L} and V_{H} domains of a single arm of an antibody, (v) a dAb fragment (Ward et al., (1989) Nature 341:544-546), which consists of a V_{H} domain; and (vi) an isolated complementarity determining region (CDR). Furthermore, although the two domains of the Fv fragment, V_{L} and V_{H}, are coded for by separate genes, they can be joined, using recombinant methods, by a synthetic linker that enables them to be made as a single protein chain in which the V_{L} and V_{H} regions pair to form monovalent molecules (known as single chain Fv (scFv): see e.g., Bird et al. (1988) Science 242:423-426; and Huston et al. (1988) Proc. Natl. Acad. Sci. USA 85:5879-5883). Such single chain antibodies are also intended to be encompassed within the term “antigen-binding portion” of an antibody. These antibody fragments are obtained using conventional techniques known to those with skill in the art, and the fragments are screened for utility in the same manner as are intact antibodies.

[0213] An “isolated antibody,” as used herein, is intended to refer to an antibody that is substantially free of other antibodies having different antigenic specificities (e.g., an isolated antibody that specifically binds any of the regulators/modulators described herein is substantially free of antibodies that specifically bind antigens other than any of the regulators/modulators described herein). An isolated antibody that specifically binds regulators/modulators described herein may, however, have cross-reactivity to other antigens, such as isoforms or related forms of the regulators/modulators proteins from other species. Moreover, an isolated antibody may be substantially free of other cellular material and/or chemicals.

[0214] The terms “monoclonal antibody” or “monoclonal antibody composition” as used herein refer to a preparation of antibody molecules of single molecular composition. A monoclonal antibody composition displays a single binding specificity and affinity for a particular epitope.

[0215] The term “human antibody,” as used herein, is intended to include antibodies having variable regions in which both the framework and CDR regions are derived from human germline immunoglobulin sequences. Furthermore, if the antibody contains a constant region, the constant region also is derived from human germline immunoglobulin sequences. The human antibodies of the invention may include amino acid residues not encoded by human germline immunoglobulin sequences (e.g., mutations introduced by random or site-specific mutagenesis in vitro or by somatic mutation in vivo). However, the term “human antibody,” as used herein, is not intended to include antibodies in which CDR sequences derived from the germline of another mammalian species, such as a mouse, have been grafted onto human framework sequences.

[0216] The term “human monoclonal antibody” refers to antibodies displaying a single binding specificity which have variable regions in which both the framework and CDR regions are derived from human germline immunoglobulin sequences. In one embodiment, the human monoclonal antibodies are produced by a hybridoma which includes a B cell obtained from a transgenic nonhuman animal, e.g., a transgenic mouse, having a genome comprising a human heavy chain transgene and a light chain transgene fused to an immortalized cell.

[0217] The term “recombinant human antibody,” as used herein, includes all human antibodies that are prepared, expressed, created or isolated by recombinant means, such as (a) antibodies isolated from an animal (e.g., a mouse) that is transgenic or transchromosomal for human immunoglobulin genes or a hybridoma prepared therefrom (described further below), (b) antibodies isolated from a host cell transformed to express the human antibody, e.g., from a transfectoma, (c) antibodies isolated from a recombinant, combinatorial human antibody library, and (d) antibodies prepared, expressed, created or isolated by any other means that involve splicing of human immunoglobulin gene sequences to other DNA sequences. Such recombinant human antibodies have variable regions in which the framework and CDR regions are derived from human germline immunoglobulin sequences. In certain embodiments, however, such recombinant human antibodies can be subjected to in vitro mutagenesis (or, when an animal transgenic for human Ig sequences is used, in vivo somatic mutagenesis) and thus the amino acid sequences of the V_{L} and V_{H} regions of the recombinant antibodies are sequences that, while derived from and related to human germline V_{L} and V_{H} sequences, may not naturally exist within the human antibody germline repertoire in vivo.

[0218] As used herein, “isotype” refers to the antibody class (e.g., IgM or IgG1) that is encoded by the heavy chain constant region genes.

[0219] The phrases “an antibody recognizing an antigen” and “an antibody specific for an antigen” are used interchangeably herein with the term “an antibody which binds specifically to an antigen.”

[0220] The term “human antibody derivatives” refers to any modified form of the human antibody, e.g., a conjugate of the antibody and another agent or antibody.

[0221] The term “humanized antibody” is intended to refer to antibodies in which CDR sequences derived from the germline of another mammalian species, such as a mouse, have been grafted onto human framework sequences. Additional framework region modifications may be made within the human framework sequences.

[0222] The term “chimeric antibody” is intended to refer to antibodies in which the variable region sequences are derived from one species and the constant region sequences are derived from another species, such as an antibody in which the variable region sequences are derived from a mouse antibody and the constant region sequences are derived from a human antibody.

[0223] As used herein, an antibody that “specifically binds to a human regulator/modulator protein described herein” is intended to refer to an antibody that binds to the human regulator/modulator protein described herein with a K_{D} of 1×10⁻⁷ M or less, more preferably 5×10⁻⁸ M or less, more preferably 1×10⁻⁸ M or less, more preferably 5×10⁻⁹ M or less, even more preferably between 1×10⁻⁸ M and 1×10⁻¹⁰ M or less.

[0224] The term “K_{assoc}” or “Kₐ,” as used herein, is intended to refer to the association rate of a particular antibody-antigen interaction, whereas the term “K_{dis}” or “K_{d},” as used herein, is intended to refer to the dissociation rate of a particular antibody-antigen interaction. The term “K_{D}.” as used herein, is intended to refer to the dissociation constant, which is obtained from the ratio of K_{d} to Kₐ (i.e., K_{d}/Kₐ) and is expressed as a molar concentration (M). K_{D} values for antibodies can be determined using methods well established in the art. A preferred method for determining the K_{D} of an antibody is by using surface plasmon resonance, preferably using a biosensor system such as a Biacore™ system.

[0225] The antibodies of the invention are characterized by particular functional features or properties of the antibodies. For example, the antibodies bind specifically to a human regulator/modulator described herein. Preferably, an antibody of the invention binds to a regulator/modulator described herein with high affinity, for example with a K_{D} of 1×10⁻⁷ M or less. The antibodies can exhibit one or more of the following characteristics:
[0226] (a) binds to a human regulator/modulator described herein with a K_{D} of 1×10⁻⁷ M or less;
[0227] (b) inhibits the function or activity of a human regulator/modulator described herein;
[0228] (c) inhibits cancer (e.g., metastatic cancer); or
[0229] (d) a combination thereof.

[0230] Assays to evaluate the binding ability of the antibodies toward a human regulator/modulator described herein can be used, including for example, ELISAs, Western blots and RIAs. The binding kinetics (e.g., binding affinity) of the antibodies also can be assessed by standard assays known in the art, such as by Biacore™, analysis.

[0231] Given that each of the subject antibodies can bind to a human regulator/modulator described herein, the V_{L} and V_{H} sequences can be “mixed and matched” to create other binding molecules that bind to a human regulator/modulator described herein. The binding properties of such “mixed and matched” antibodies can be tested using the binding assays described above and assessed in assays described in the examples. When V_{L} and V_{H} chains are mixed and matched, a V_{H} sequence from a particular V_{H}/V_{L} pairing can be replaced with a structurally similar V_{H} sequence. Likewise, preferably a V_{L} sequence from a particular V_{H}/V_{L} pairing is replaced with a structurally similar V_{L} sequence.

[0232] Accordingly, in one aspect, the invention provides an isolated monoclonal antibody, or antigen binding portion thereof comprising:
[0233] (a) a heavy chain variable region comprising an amino acid sequence; and
[0234] (b) a light chain variable region comprising an amino acid sequence;
[0235] wherein the antibody specifically binds a human regulator/modulator described herein.

[0236] In some cases, the CDR3 domain, independently from the CDR1 and/or CDR2 domain(s), alone can determine the binding specificity of an antibody for a cognate antigen and that multiple antibodies can predictably be generated having the same binding specificity based on a common CDR3 sequence. See, for example, Klimka et al., British J. of Cancer 83(2):252-260 (2000) (describing the production of a humanized anti-CD30 antibody using only the heavy chain variable domain CDR3 of murine anti-CD30 antibody Ki-4); Beiboer et al., J. Mol. Biol. 296:833-849 (2000) (describing recombinant epithelial glycoprotein-2 (EGP-2) antibodies using only the heavy chain CDR3 sequence of the parental murine MOC-31 anti-EGP-2 antibody): Rader et al., Proc. Natl. Acad. Sci. U.S.A. 95:8910-8915 (1998) (describing a panel of humanized anti-integrin alphaᵥbeta₃ antibodies using a heavy and light chain variable CDR3 domain. Hence, in some cases a mixed and matched antibody or a humanized antibody contains a CDR3 antigen binding domain that is specific for any of the regulators/modulators described herein.

### Assays for Drug Development/Treating

[0237] Methods are also described herein for evaluating whether test agents can modulate the expression or activity of any of the regulators/modulators described herein. T cells, cancer cells, and combinations thereof can be evaluated for susceptibility to treatment with candidate compounds.

[0238] Specifically, the methods can include assay steps for identifying a candidate test agent that selectively modulates the proliferation, functioning, or viability of T cells or cancer cells, or for increasing or decreasing the levels or functioning of regulators described herein. For example, if the proliferation, cytokine production activity, or viability of T cells is increased or decreased in the presence of one or more of the regulators described herein but the proliferation, cytokine production, activity, or the proliferation, activity, or viability of the T cells in the T cell-regulator assay mixture changes in the presence of a test agent then that test agent has utility for modulating the regulator of the T cells. Such a test agent is referred to as a, modulator.

[0239] An assay can include determining whether a test agent can specifically cause decreased or increased numbers of T cells or whether a compound can specifically cause decreased or increased functioning of T cells. If the test agent does cause altered T cell numbers or T cell functioning, then the test agent can be selected/identified for further study, such as for its suitability as a therapeutic agent to treat a cancer or an immune condition or disease. For example, the test agent identified by the selection methods featured in the invention can be further examined for their ability to target a tumor, target an immune cell, or to treat cancer by, for example, administering the test agent (modulator) to an animal model.

[0240] The cells that are evaluated can include cytotoxic T cells, helper T cells, regulatory T cells, naive T cells, activated T cells, CD4 T cells, CD8 T cells, metastatic cells, benign cell samples, cell lines (including as cancer cell lines), or a combination thereof. The cells that are evaluated can also include cells from a patient with cancer (including a patient with metastatic cancer), or cells from a known cancer type or cancer cell line, or cells exhibiting an overproduction of any of the regulators described herein. A test agent that can modulate the production or activity of any of these cell types can be administered to an animal, including a patient.

[0241] For example, one method, can include (a) obtaining a cell sample from a patient: (b) measuring the amount or concentration of T cells/regulators/modulators in a known number or weight of cells from the sample to generate a reference value: (c) mixing the known number or weight of cells from the sample with a test agent to generate a test assay: (d) measuring the amount or numbers of T cells, regulators or modulators in the test assay to generate a test assay T cell/regulator/modulator value: (e) optionally repeating steps (c) and (d) with separate samples; and (f) selecting a test agent with a lower or higher a test assay T cell/regulator/modulator value than the reference value. The method can further include administering a test agent to an animal model, for example, to further evaluate the toxicity and/or efficacy of the test agent. In some cases, the method can further include administering the test agent to the patient from whom the cell or tissue sample as obtained.

[0242] Test agents or modulators (e.g., top hits identified by any method described herein) can be used in a cell-based assay using T cells or cells that express any of the regulators described herein as a readout of the efficacy of the test agents or modulators.

[0243] Assay methods are also described herein for identifying and assessing the potency of agents that may modulate T cell exhaustion/dysfunction resistance of any of the regulators listed in Table 1 or FIGS. 1-27.

[0244] For example, T cells can release cytokines, such as Interferon γ or Interleukin-2. T cells or T cells expressing any of the modulators described herein can be contacted with a test agent and the release of cytokines by the T-cells can be measured. Such a test agent-related level of cytokines can be compared to the level observed for T cells not contacted with a test agent.

[0245] Useful test regulators, modulators, and test agents can be administered to a test animal or a patient.

[0246] “Treatment” or “treating” refers to both therapeutic treatment and to prophylactic or preventative measures. Those in need of treatment include those already with the disorder as well as those prone to have the disorder, or those in whom the disorder is to be prevented.

[0247] “Subject” for purposes of administration of a regulator, modulator, test agent or composition described herein refers to administration to any animal classified as a mammal or bird, including humans, domestic animals, farm animals, zoo animals, experimental animals, pet animals, such as dogs, horses, cats, cows, etc. The experimental animals can include mice, rats, guinea pigs, goats, dogs, monkeys, or a combination thereof. In some cases, the subject is human.

[0248] As used herein, the term “cancer” includes solid animal tumors as well as hematological malignancies. The terms “tumor cell(s)” and “cancer cell(s)” are used interchangeably herein.

[0249] “Solid animal tumors” include cancers of the head and neck, lung, mesothelioma, mediastinum, lung, esophagus, stomach, pancreas, hepatobiliary system, small intestine, colon, colorectal, rectum, anus, kidney, urethra, bladder, prostate, urethra, penis, testis, gynecological organs, ovaries, breast, endocrine system, skin central nervous system; sarcomas of the soft tissue and bone; and melanoma of cutaneous and intraocular origin. In addition, a metastatic cancer at any stage of progression can be treated, such as micrometastatic tumors, megametastatic tumors, and recurrent cancers.

[0250] In some cases, a hematological cancer or hematological malignancy can be treated. The term “hematological malignancies” includes adult or childhood leukemia and lymphomas, Hodgkin's disease, lymphomas of lymphocytic and cutaneous origin, acute and chronic leukemia, plasma cell neoplasm, and cancers associated with AIDS.

[0251] The inventive methods and compositions can also be used to treat leukemias, lymph nodes, thymus tissues, tonsils, spleen, cancer of the breast, cancer of the lung, cancer of the adrenal cortex, cancer of the cervix, cancer of the endometrium, cancer of the esophagus, cancer of the head and neck, cancer of the liver, cancer of the pancreas, cancer of the prostate, cancer of the thymus, carcinoid tumors, chronic lymphocytic leukemia, Ewing's sarcoma, gestational trophoblastic tumors, hepatoblastoma, multiple myeloma, non-small cell lung cancer, retinoblastoma, or tumors in the ovaries. A cancer at any stage of progression can be treated or detected, such as primary, metastatic, and recurrent cancers. In some cases, metastatic cancers are treated but primary cancers are not treated. Information regarding numerous types of cancer can be found, e.g., from the American Cancer Society (cancer.org), or from, e.g., Wilson et al. (1991) Harrison's Principles of Internal Medicine, 12th Edition, McGraw-Hill. Inc.

[0252] In some embodiments, the cancer and/or tumors to be treated are hematological malignancies, or those of lymphoid origin such as cancers or tumors of lymph nodes, thymus tissues, tonsils, spleen, and cells related thereto. In some embodiments, the cancer and/or tumors to be treated are those that have been resistant to T cell therapies.

[0253] Treatment of, or treating, metastatic cancer can include the reduction in cancer cell migration or the reduction in establishment of at least one metastatic tumor. The treatment also includes alleviation or diminishment of more than one symptom of metastatic cancer such as coughing, shortness of breath, hemoptysis, lymphadenopathy, enlarged liver, nausea, jaundice, bone pain, bone fractures, headaches, seizures, systemic pain and combinations thereof. The treatment may cure the cancer, e.g., it may prevent metastatic cancer, it may substantially eliminate metastatic tumor formation and growth, and/or it may arrest or inhibit the migration of metastatic cancer cells.

[0254] Anti-cancer activity can reduce the progression of a variety of cancers (e.g., breast, lung, pancreatic, or prostate cancer) using methods available to one of skill in the art. Anti-cancer activity, for example, can determined by identifying the lethal dose (LD₁₀₀) or the 50% effective dose (ED50) or the dose that inhibits growth at 50% (GI₅₀) of an agent of the present invention that prevents the migration of cancer cells. In one aspect, anti-cancer activity is the amount of the agent that reduces 50%, 60%, 70%, 80%, 90%, 95%, 97%, 98%, 99% or 100% of cancer cell migration, for example, when measured by detecting expression of a cancer cell marker at sites proximal or distal from a primary tumor site, or when assessed using available methods for detecting metastases.

[0255] In another example, agents that increase or decrease regulator/modulator expression or function can be administered to sensitize tumor cells to immune therapies. Hence, by administering an agent that increase or decrease regulator/modulator expression or function, tumor cells can become more sensitive to the immune system and to various immune therapies.

### Compositions

[0256] The invention also relates to compositions containing one or more active agents such as any of the regulators described herein, modulators described herein, or combinations thereof. Such active agents can be a polypeptide, a nucleic acid encoding a polypeptide (e.g., within an expression cassette or expression vector), a modified cell, an inhibitory nucleic acid, a small molecule, a compound identified by a method described herein, or a combination thereof. The compositions can be pharmaceutical compositions. In some embodiments, the compositions can include a pharmaceutically acceptable carrier. By “pharmaceutically acceptable” it is meant that a carrier, diluent, excipient, and/or salt is compatible with the other ingredients of the formulation, and not deleterious to the recipient thereof.

[0257] The composition can be formulated in any convenient form. In some embodiments, the compositions can include a protein or polypeptide encoded by any of the genes listed in Table 1 or FIGS. 1-27. In other embodiments, the compositions can include at least one nucleic acid or expression cassette encoding a polypeptide listed in Table 1 or FIGS. 1-27. In other embodiments, the compositions can include at least one nucleic acid or expression cassette that includes a nucleic acid segment complementarity to a gene listed in Table 1 (e.g., an inhibitory nucleic acid). In other embodiments, the compositions can include at least one nucleic acid or expression cassette that includes a nucleic acid segment encoding a cas nuclease and at least one guide RNA that can target a regulator or modulator described herein. In other embodiments, the compositions can include at least one antibody that binds at least one protein encoded by at least one gene listed in Table 1 or FIGS. 1-27. In other embodiments, the compositions can include at least one small molecule that binds, that activates, or that inhibits at least one gene listed in Table 1 or FIGS. 1-27, or at least one small molecule that binds, that activates, or that inhibits at least one protein encoded by at least one gene listed in Table 1 or FIGS. 1-27. In other embodiments, the compositions can include cells with at least one modified genomic regulator or modulator genetic site, cells that express one or more of the regulators described herein, cells that express a cas nuclease and at least one guide RNA that can target at least one regulator or modulator gene, cells that express one or more inhibitory nucleic acids, or a combination thereof. The cells can be immune cells. In some cases, the cells can be one or more types of lymphoid cells, myeloid cells, cytotoxic T cells, helper T cells, regulatory T cells, naive T cells, activated T cells, CD4 T cells, CD8 T cells, gamma delta T cells, chimeric antigen receptor (CAR) cells, natural killer (NK) cells, induced pluripotent stem cell-derived immune (e.g., lymphoid and/or myeloid) cells, or a combination thereof.

[0258] The amount or number of cells administered can vary but amounts in the range of about 10⁶ to about 10⁹ cells can be used. The cells are generally delivered in a physiological solution such as saline or buffered saline. The cells can also be delivered in a vehicle such as within a population of liposomes, exosomes or microvesicles.

[0259] In some embodiments, the active agents of the invention (e.g., polypeptide, a nucleic acid encoding a polypeptide (e.g., within an expression cassette or expression vector), an antibody, an inhibitory nucleic acid, a small molecule, a compound identified by a method described herein, modified cells, or a combination thereof), are administered in a “therapeutically effective amount.” Such a therapeutically effective amount is an amount sufficient to obtain the desired physiological effect, such a reduction of at least one symptom of disease.

[0260] The disease can be cancer or an immune disease or condition. For example, active agents can reduce the symptoms of disease by 5%, or 10%, or 15%, or 20%, or 25%, or 30%, or 35%, or 40%, or 45%, or 50%, or 55%, or 60%, or 65%, or %70, or 80%, or 90%, 095%, or 97%, or 99%, or any numerical percentage between 5% and 100%. For example, symptoms of cancer can also include tumor cachexia, tumor-induced pain conditions, tumor-induced fatigue, tumor growth, and metastatic spread. Hence, the active agents may also reduce tumor cachexia, tumor-induced pain conditions, tumor-induced fatigue, tumor growth, or a combination thereof by 5%, or 10%, or 15%, or 20%, or 25%, or 30%, or 35%, or 40%, or 45%, or 50%, or 55%, or 60%, or 65%, or %70, or 80%, or 90%, 095%, or 97%, or 99%, or any numerical percentage between 5% and 100%.

[0261] To achieve the desired effect(s), the active agents may be administered as single or divided dosages. For example, active agents can be administered in dosages of at least about 0.01 mg/kg to about 500 to 750 mg/kg, of at least about 0.01 mg/kg to about 300 to 500 mg/kg, at least about 0.1 mg/kg to about 100 to 300 mg/kg or at least about 1 mg/kg to about 50 to 100 mg/kg of body weight, although other dosages may provide beneficial results. The amount administered will vary depending on various factors including, but not limited to, the type of small molecules, compounds, peptides, or nucleic acid chosen for administration, the disease, the weight, the physical condition, the health, and the age of the mammal. Such factors can be readily determined by the clinician employing animal models or other test systems that are available in the art.

[0262] Administration of the active agents in accordance with the present invention may be in a single dose, in multiple doses, in a continuous or intermittent manner, depending, for example, upon the recipient's physiological condition, whether the purpose of the administration is therapeutic or prophylactic, and other factors known to skilled practitioners. The administration of the active agents and compositions of the invention may be essentially continuous over a preselected period of time or may be in a series of spaced doses. Both local and systemic administration is contemplated.

[0263] To prepare the composition, small molecules, compounds, polypeptides, nucleic acids, expression cassettes, ribonucleoprotein complexes, and other agents are synthesized or otherwise obtained, purified as necessary or desired. These small molecules, compounds, polypeptides, nucleic acids, expression cassettes, ribonucleoprotein complexes, and other agents can be suspended in a pharmaceutically acceptable carrier and/or lyophilized or otherwise stabilized. The small molecules, compounds, polypeptides, nucleic acids, expression cassettes, ribonucleoprotein complexes, other agents, and combinations thereof can be adjusted to an appropriate concentration, and optionally combined with other agents. The absolute weight of a given small molecule, compound, polypeptide, nucleic acid, ribonucleoprotein complex, and/or other agents included in a unit dose can vary widely. For example, about 0.01 to about 2 g, or about 0.1 to about 500 mg, of at least one molecule, compound, polypeptide, nucleic acid, ribonucleoprotein complexes, and/or other agent, or a plurality of molecules, compounds, polypeptides, nucleic acids, ribonucleoprotein complexes, and/or other agents can be administered. Alternatively, the unit dosage can vary from about 0.01 g to about 50 g, from about 0.01 g to about 35 g, from about 0.1 g to about 25 g, from about 0.5 g to about 12 g, from about 0.5 g to about 8 g, from about 0.5 g to about 4 g, or from about 0.5 g to about 2 g.

[0264] Daily doses of the active agents of the invention can vary as well. Such daily doses can range, for example, from about 0.1 g/day to about 50 g/day, from about 0.1 g/day to about 25 g/day, from about 0.1 g/day to about 12 g/day, from about 0.5 g/day to about 8 g/day, from about 0.5 g/day to about 4 g/day, and from about 0.5 g/day to about 2 g/day.

[0265] It will be appreciated that the amount of active agent for use in treatment will vary not only with the particular carrier selected but also with the route of administration, the nature of the cancer condition being treated and the age and condition of the patient. Ultimately the attendant health care provider can determine proper dosage. In addition, a pharmaceutical composition can be formulated as a single unit dosage form.

[0266] Thus, one or more suitable unit dosage forms comprising the active agent(s) can be administered by a variety of routes including parenteral (including subcutaneous, intravenous, intramuscular and intraperitoneal), oral, rectal, dermal, transdermal, intrathoracic, intrapulmonary and intranasal (respiratory) routes. The active agent(s) may also be formulated for sustained release (for example, using microencapsulation, see WO 94/07529, and U.S. Pat. No. 4,962,091). The formulations may, where appropriate, be conveniently presented in discrete unit dosage forms and may be prepared by any of the methods well known to the pharmaceutical arts. Such methods may include the step of mixing the active agent with liquid carriers, solid matrices, semi-solid carriers, finely divided solid carriers or combinations thereof, and then, if necessary, introducing or shaping the product into the desired delivery system. For example, the active agent(s) can be linked to a convenient carrier such as a nanoparticle, albumin, polyalkylene glycol, or be supplied in prodrug form. The active agent(s), and combinations thereof can be combined with a carrier and/or encapsulated in a vesicle such as a liposome.

[0267] The compositions of the invention may be prepared in many forms that include aqueous solutions, suspensions, tablets, hard or soft gelatin capsules, and liposomes and other slow-release formulations, such as shaped polymeric gels. Administration of inhibitors can also involve parenteral or local administration of the in an aqueous solution or sustained release vehicle.

[0268] Thus, while the active agent(s) and/or other agents can sometimes be administered in an oral dosage form, that oral dosage form can be formulated so as to protect the small molecules, compounds, polypeptides, nucleic acids, expression cassettes, ribonucleoprotein complexes, and combinations thereof from degradation or breakdown before the small molecules, compounds, polypeptides, nucleic acids encoding such polypeptides, expression cassettes, ribonucleoprotein complexes, and combinations thereof provide therapeutic utility. For example, in some cases the small molecules, compounds, polypeptides, nucleic acids encoding such polypeptide, expression cassettes, ribonucleoprotein complexes, and/or other agents can be formulated for release into the intestine after passing through the stomach. Such formulations are described, for example, in U.S. Pat. No. 6,306,434 and in the references contained therein.

[0269] Liquid pharmaceutical compositions may be in the form of, for example, aqueous or oily suspensions, solutions, emulsions, syrups or elixirs, dry powders for constitution with water or other suitable vehicle before use. Such liquid pharmaceutical compositions may contain conventional additives such as suspending agents, emulsifying agents, non-aqueous vehicles (which may include edible oils), or preservatives. The pharmaceutical compositions may take such forms as suspensions, solutions, or emulsions in oily or aqueous vehicles, and may contain formulatory agents such as suspending, stabilizing and/or dispersing agents. Suitable carriers include saline solution, encapsulating agents (e.g., liposomes), and other materials. The active agent(s) and/or other agents can be formulated in dry form (e.g., in freeze-dried form), in the presence or absence of a carrier. If a carrier is desired, the carrier can be included in the pharmaceutical formulation, or can be separately packaged in a separate container, for addition to the inhibitor that is packaged in dry form, in suspension or in soluble concentrated form in a convenient liquid.

[0270] An active agent(s) and/or other agents can be formulated for parenteral administration (e.g., by injection, for example, bolus injection or continuous infusion) and may be presented in unit dosage form in ampoules, prefilled syringes, small volume infusion containers or multi-dose containers with an added preservative.

[0271] The compositions can also contain other ingredients such as active agents, anti-viral agents, antibacterial agents, antimicrobial agents and/or preservatives. Examples of additional therapeutic agents that may be used include, but are not limited to: alkylating agents, such as nitrogen mustards, alkyl sulfonates, nitrosoureas, ethylenimines, and triazenes; antimetabolites, such as folate antagonists, purine analogues, and pyrimidine analogues; antibiotics, such as anthracyclines, bleomycins, mitomycin, dactinomycin, and plicamycin; enzymes, such as L-asparaginase; farnesyl-protein transferase inhibitors; hormonal agents, such as glucocorticoids, estrogens/antiestrogens, androgens/antiandrogens, progestins, and luteinizing hormone-releasing hormone anatagonists, octreotide acetate; microtubule-disruptor agents, such as ecteinascidins or their analogs and derivatives; microtubule-stabilizing agents such as paclitaxel (Taxol®), docetaxel (Taxotere®), and epothilones A-F or their analogs or derivatives; plant-derived products, such as vinca alkaloids, epipodophyllotoxins, taxanes; and topoisomerase inhibitors; prenyl-protein transferase inhibitors; and miscellaneous agents such as, hydroxyurea, procarbazine, mitotane, hexamethylmelamine, platinum coordination complexes such as cisplatin and carboplatin; and other agents used as anti-cancer and cytotoxic agents such as biological response modifiers, growth factors; immune modulators, and monoclonal antibodies. The compositions can also be used in conjunction with radiation therapy.

[0272] The present description is further illustrated by the following examples, which should not be construed as limiting in any way. The contents of all cited references (including literature references, issued patents, published patent applications as cited throughout this application) are hereby expressly incorporated by reference.

### EXAMPLES

### Example 1

### Methods

[0273] Human T cells were sourced from PBMC-enriched leukapheresis products (Leukopaks, STEMCELL Technologies, catalog no. 70500.2) from healthy donors, after institutional review board-approved informed written consent (STEMCELL Technologies). CD8+ T cells were isolated from Leukopaks using EasySep magnetic selection following the manufacturer's recommended protocol (STEMCELL Technologies, catalog no. 17953).

[0274] CD8+ T cells were cultured in X-VIVO 15 (Lonza Bioscience, catalog no. 04-418Q) supplemented with 5% fetal calf serum (FCS), and 100 IU/ml of recombinant human IL-2 (Amerisource Bergen, catalog no. 10101641). Primary CD8+ T cells were activated using anti-human CD3/CD28 CTS Dynabeads (Fisher Scientific, catalog no. 40203D) at a 1:1 cell:bead ratio at 10⁶ cells/ml.

[0275] Eighteen hours after activation, CD8+ T cells from two human blood donors were transduced with concentrated mCherry-2A-dCas9-VP64 (CRISPRa), or mCherry-2A-ZIM3-dCas9 (CRISPRi) lentivirus. Eight hours following dCas9 transduction, cells were transduced with either genome-wide CRISPRa library Calabrese (Addgene, catalog nos. 92379/92380) or genome-wide CRISPRi library Dolcetto (Addgene, catalog nos. 92385/92386). 16 hours following library transductions, cells were split into two groups and transduced with chimeric antigen receptor CAR lentiviruses; anti-CD19-28-zeta-2A-GFP, or high-affinity (HA) anti-GD2-28-zeta-2A-GFP. Three days post-activation puromycin was added to select for library transduced cells. After two days of puromycin selection cells were sorted for mCherry+(dCas9+) and GFP+(CAR+) cells by fluorescence activated cell sorting (FACS).

[0276] Cells were passaged every 2-3 days as needed, adding medium to maintain densities at 10⁶ cells/ml, adding IL-2 to 100 IU/ml at each passage. At least 100-fold library coverage was maintained at each passage. On days 9 and 18 post-activation T cells were re-stimulated with NALM6-GD2 target cells (CD19+/GD2+) at 1:1 effector to target ratio. At each passage cells were sampled at >=100-fold library coverage for downstream genomic DNA extraction and sgRNA PCR.

[0277] Genomic DNA was extracted from cells as described previously (Freimer et al. Nat Genet. 2022 August; 54(8):1133-1144. doi: 10.1038/s41588-022-01106-y. Epub 2022 Jul. 11; PMID:35817986) Integrated sgRNA sequences were amplified as described previously (Sanson et al. Nat Commun. 2018 Dec. 21; 9(1):5416. doi: 10.1038/s41467-018-07901-8; PMID:30575746), and sequencing libraries were subsequently agarose gel purified using NucleoSpin Gel and PCR Clean-up Mini kit (Machery-Nagel, catalog no. 740609.50). Libraries from days 5, 13, 18, and 22 post-activation were sequenced on a NextSeq500 instrument to a minimum targeted depth of 100-fold coverage.

[0278] Reads were aligned to the appropriate reference library using MAGeCK version 0.5.9.2 (PMID:25476604) using the count command with -trim-5 22,23,24,25,26,28,29,30 argument to remove the staggered 5′ adapter. Statistics were generated with MAGeCK test command for the following comparisons: (1) HAGD2-CAR days 18/22 versus day 5 (HAGD2-CAR time), (2) CD19-CAR days 18/22 versus day 5 (CD19-CAR time), (3) HAGD2-CAR days 18/22 versus CD19-CAR days 18/22 (HAGD2-vs-CD19). For each comparison significant genes were defined as having a false discovery rate (FDR)>0.1 in the positive enrichment tests. Hits were defined as being significant in the HAGD2-CAR time test and either a hit in the HAGD2-vs-CD19 or not a hit in the CD19-CAR time test.

[0279] The CRISPRa and CRISPRi screens discovered 37 and 69 genes (FDR<0.1), respectively, that when upregulated or downregulated caused exhaustion/dysfunction resistance (Table 1).

TABLE 1

| | | | pos \| | pos \| | pos \| | pos \| |
|---|---|---|---|---|---|---|
| CRISPRa.or.i | comparison.test | gene | p-value | fdr | rank | lfc |
| CRISPRa | GD2 CAR | FOXL2NB | 2.62E−07 | 4.50E−04 | 1 | 6.0517 |
| | Abundance (Late | | | | | |
| | vs Early) | | | | | |
| CRISPRa | GD2 CAR | FOXO6 | 2.62E−07 | 4.50E−04 | 2 | 3.6955 |
| | Abundance (Late | | | | | |
| | vs Early) | | | | | |
| CRISPRa | GD2 CAR | IRF4 | 2.62E−07 | 4.50E−04 | 3 | 3.4857 |
| | Abundance (Late | | | | | |
| | vs Early) | | | | | |
| CRISPRa | GD2 CAR | STAT5A | 2.62E−07 | 4.50E−04 | 4 | 2.295 |
| | Abundance (Late | | | | | |
| | vs Early) | | | | | |
| CRISPRa | GD2 CAR | IL2RA | 2.62E−07 | 4.50E−04 | 5 | 2.166 |
| | Abundance (Late | | | | | |
| | vs Early) | | | | | |
| CRISPRa | GD2 CAR | GLIS3 | 2.62E−07 | 4.50E−04 | 6 | 2.0829 |
| | Abundance (Late | | | | | |
| | vs Early) | | | | | |
| CRISPRa | GD2 CAR | BATF | 2.62E−07 | 4.50E−04 | 7 | 2.1192 |
| | Abundance (Late | | | | | |
| | vs Early) | | | | | |
| CRISPRa | GD2 CAR | FOXO4 | 2.62E−07 | 4.50E−04 | 8 | 2.6448 |
| | Abundance (Late | | | | | |
| | vs Early) | | | | | |
| CRISPRa | GD2 CAR | IL2RB | 2.62E−07 | 4.50E−04 | 9 | 2.1364 |
| | Abundance (Late | | | | | |
| | vs Early) | | | | | |
| CRISPRa | GD2 CAR | ITPKA | 2.62E−07 | 4.50E−04 | 10 | 2.1802 |
| | Abundance (Late | | | | | |
| | vs Early) | | | | | |
| CRISPRa | GD2 CAR | EOMES | 2.62E−07 | 4.50E−04 | 11 | 1.6566 |
| | Abundance (Late | | | | | |
| | vs Early) | | | | | |
| CRISPRa | GD2 CAR | IL10 | 1.83E−06 | 0.002666 | 12 | 1.3509 |
| | Abundance (Late | | | | | |
| | vs Early) | | | | | |
| CRISPRa | GD2 CAR | PTEN | 1.31E−06 | 0.002063 | 13 | 2.0867 |
| | Abundance (Late | | | | | |
| | vs Early) | | | | | |
| CRISPRa | GD2 CAR | GLI2 | 2.35E−06 | 0.003182 | 14 | 2.2368 |
| | Abundance (Late | | | | | |
| | vs Early) | | | | | |
| CRISPRa | GD2 CAR | TRAF3IP2 | 7.06E−06 | 0.008911 | 15 | 1.7376 |
| | Abundance (Late | | | | | |
| | vs Early) | | | | | |
| CRISPRa | GD2 CAR | FOSL1 | 9.15E−06 | 0.010829 | 16 | 1.2591 |
| | Abundance (Late | | | | | |
| | vs Early) | | | | | |
| CRISPRa | GD2 CAR | FOXL2 | 1.12E−05 | 0.012522 | 17 | 1.7211 |
| | Abundance (Late | | | | | |
| | vs Early) | | | | | |
| CRISPRa | GD2 CAR | LIFR | 1.39E−05 | 0.01433 | 18 | 1.6697 |
| | Abundance (Late | | | | | |
| | vs Early) | | | | | |
| CRISPRa | GD2 CAR | ZNF211 | 1.44E−05 | 0.01433 | 19 | 0.68556 |
| | Abundance (Late | | | | | |
| | vs Early) | | | | | |
| CRISPRa | GD2 CAR | FOSB | 2.17E−05 | 0.019566 | 20 | 1.4773 |
| | Abundance (Late | | | | | |
| | vs Early) | | | | | |
| CRISPRa | GD2 CAR | NPM3 | 2.17E−05 | 0.019566 | 21 | 1.503 |
| | Abundance (Late | | | | | |
| | vs Early) | | | | | |
| CRISPRa | GD2 CAR | SHOC2 | 3.32E−05 | 0.028578 | 22 | 1.143 |
| | Abundance (Late | | | | | |
| | vs Early) | | | | | |
| CRISPRa | GD2 CAR | S100A13 | 4.21E−05 | 0.034653 | 23 | −0.22005 |
| | Abundance (Late | | | | | |
| | vs Early) | | | | | |
| CRISPRa | GD2 CAR | TMEM167B | 4.47E−05 | 0.035272 | 24 | 1.0315 |
| | Abundance (Late | | | | | |
| | vs Early) | | | | | |
| CRISPRa | GD2 CAR | LCK | 5.62E−05 | 0.040937 | 25 | 0.75049 |
| | Abundance (Late | | | | | |
| | vs Early) | | | | | |
| CRISPRa | GD2 CAR | IL9R | 5.62E−05 | 0.040937 | 26 | 1.0022 |
| | Abundance (Late | | | | | |
| | vs Early) | | | | | |
| CRISPRa | GD2 CAR | CUL3 | 6.35E−05 | 0.044554 | 27 | 1.2708 |
| | Abundance (Late | | | | | |
| | vs Early) | | | | | |
| CRISPRa | GD2 CAR | INPP5D | 6.90E−05 | 0.046676 | 28 | 0.98522 |
| | Abundance (Late | | | | | |
| | vs Early) | | | | | |
| CRISPRa | GD2 CAR | NQO1 | 1.05E−04 | 0.067605 | 29 | 1.0236 |
| | Abundance (Late | | | | | |
| | vs Early) | | | | | |
| CRISPRa | GD2 CAR | PLEKHH3 | 1.13E−04 | 0.067605 | 30 | 1.6227 |
| | Abundance (Late | | | | | |
| | vs Early) | | | | | |
| CRISPRa | GD2 CAR | TSR2 | 1.14E−04 | 0.067605 | 31 | 1.2021 |
| | Abundance (Late | | | | | |
| | vs Early) | | | | | |
| CRISPRa | GD2 CAR | CLASRP | 1.18E−04 | 0.067957 | 32 | −0.045175 |
| | Abundance (Late | | | | | |
| | vs Early) | | | | | |
| CRISPRa | GD2 CAR | ITPKB | 1.23E−04 | 0.068579 | 33 | 0.97166 |
| | Abundance (Late | | | | | |
| | vs Early) | | | | | |
| CRISPRa | GD2 CAR | VAV1 | 1.38E−04 | 0.07454 | 34 | 0.8347 |
| | Abundance (Late | | | | | |
| | vs Early) | | | | | |
| CRISPRa | GD2 CAR | RFLNB | 1.13E−04 | 0.067605 | 35 | 0.71374 |
| | Abundance (Late | | | | | |
| | vs Early) | | | | | |
| CRISPRa | GD2 CAR | LYN | 1.57E−04 | 0.082371 | 36 | 1.371 |
| | Abundance (Late | | | | | |
| | vs Early) | | | | | |
| CRISPRa | GD2 CAR | CDKL3 | 1.79E−04 | 0.091383 | 37 | −0.03913 |
| | Abundance (Late | | | | | |
| | vs Early) | | | | | |
| CRISPRa | GD2 CAR | TRMT44 | 9.01E−04 | 0.279581 | 61 | 0.033711 |
| | Abundance (Late | | | | | |
| | vs Early) | | | | | |
| CRISPRa | GD2 CAR | HOXB13 | 0.0028046 | 0.421381 | 124 | 0.9794 |
| | Abundance (Late | | | | | |
| | vs Early) | | | | | |
| CRISPRa | GD2 CAR | WAS | 0.0031587 | 0.434896 | 134 | 0.8214 |
| | Abundance (Late | | | | | |
| | vs Early) | | | | | |
| CRISPRa | GD2 CAR | KLLN | 0.0064437 | 0.538383 | 224 | 1.1315 |
| | Abundance (Late | | | | | |
| | vs Early) | | | | | |
| CRISPRa | CD19 CAR | IRF4 | 4.21E−05 | 0.183168 | 4 | 0.84928 |
| | Abundance (Late | | | | | |
| | vs Early) | | | | | |
| CRISPRa | CD19 CAR | NQO1 | 7.71E−05 | 0.190594 | 6 | 1.1993 |
| | Abundance (Late | | | | | |
| | vs Early) | | | | | |
| CRISPRa | CD19 CAR | ITPKA | 0.0024767 | 0.66343 | 69 | 0.75072 |
| | Abundance (Late | | | | | |
| | vs Early) | | | | | |
| CRISPRa | CD19 CAR | BATF | 0.0030745 | 0.674547 | 85 | 0.836 |
| | Abundance (Late | | | | | |
| | vs Early) | | | | | |
| CRISPRa | CD19 CAR | FOSL1 | 0.02337 | 0.842593 | 517 | −0.008423 |
| | Abundance (Late | | | | | |
| | vs Early) | | | | | |
| CRISPRa | CD19 CAR | TRMT44 | 0.023871 | 0.843108 | 529 | −0.59179 |
| | Abundance (Late | | | | | |
| | vs Early) | | | | | |
| CRISPRa | CD19 CAR | IL2RA | 0.024264 | 0.846826 | 534 | 0.4588 |
| | Abundance (Late | | | | | |
| | vs Early) | | | | | |
| CRISPRa | CD19 CAR | TSR2 | 0.037475 | 0.876525 | 800 | 0.53591 |
| | Abundance (Late | | | | | |
| | vs Early) | | | | | |
| CRISPRa | CD19 CAR | STAT5A | 0.047125 | 0.889642 | 991 | 0.58375 |
| | Abundance (Late | | | | | |
| | vs Early) | | | | | |
| CRISPRa | CD19 CAR | IL9R | 0.04864 | 0.889642 | 1023 | 0.34374 |
| | Abundance (Late | | | | | |
| | vs Early) | | | | | |
| CRISPRa | CD19 CAR | LIFR | 0.060521 | 0.899629 | 1263 | 0.1627 |
| | Abundance (Late | | | | | |
| | vs Early) | | | | | |
| CRISPRa | CD19 CAR | TRAF3IP2 | 0.060829 | 0.899629 | 1269 | 0.3436 |
| | Abundance (Late | | | | | |
| | vs Early) | | | | | |
| CRISPRa | CD19 CAR | ZNF211 | 0.079776 | 0.917706 | 1627 | 0.2213 |
| | Abundance (Late | | | | | |
| | vs Early) | | | | | |
| CRISPRa | CD19 CAR | EOMES | 0.094751 | 0.930243 | 1908 | −0.82963 |
| | Abundance (Late | | | | | |
| | vs Early) | | | | | |
| CRISPRa | CD19 CAR | IL10 | 0.11113 | 0.935544 | 2219 | 0.46186 |
| | Abundance (Late | | | | | |
| | vs Early) | | | | | |
| CRISPRa | CD19 CAR | S100A13 | 0.11544 | 0.935544 | 2310 | 0.036239 |
| | Abundance (Late | | | | | |
| | vs Early) | | | | | |
| CRISPRa | CD19 CAR | CDKL3 | 0.17405 | 0.960475 | 3406 | −0.31789 |
| | Abundance (Late | | | | | |
| | vs Early) | | | | | |
| CRISPRa | CD19 CAR | FOSB | 0.17565 | 0.960798 | 3438 | 0.34676 |
| | Abundance (Late | | | | | |
| | vs Early) | | | | | |
| CRISPRa | CD19 CAR | GLIS3 | 0.20728 | 0.966849 | 4038 | 0.25755 |
| | Abundance (Late | | | | | |
| | vs Early) | | | | | |
| CRISPRa | CD19 CAR | SHOC2 | 0.24628 | 0.981523 | 4722 | −0.10855 |
| | Abundance (Late | | | | | |
| | vs Early) | | | | | |
| CRISPRa | CD19 CAR | LCK | 0.27229 | 0.987987 | 5190 | 0.18388 |
| | Abundance (Late | | | | | |
| | vs Early) | | | | | |
| CRISPRa | CD19 CAR | FOXL2NB | 0.27464 | 0.988831 | 5239 | −0.89072 |
| | Abundance (Late | | | | | |
| | vs Early) | | | | | |
| CRISPRa | CD19 CAR | LYN | 0.28622 | 0.990105 | 5449 | 0.080476 |
| | Abundance (Late | | | | | |
| | vs Early) | | | | | |
| CRISPRa | CD19 CAR | HOXB13 | 0.38648 | 1 | 7172 | −0.58138 |
| | Abundance (Late | | | | | |
| | vs Early) | | | | | |
| CRISPRa | CD19 CAR | IL2RB | 0.39917 | 1 | 7392 | 0.13749 |
| | Abundance (Late | | | | | |
| | vs Early) | | | | | |
| CRISPRa | CD19 CAR | CLASRP | 0.42864 | 1 | 7922 | −0.15441 |
| | Abundance (Late | | | | | |
| | vs Early) | | | | | |
| CRISPRa | CD19 CAR | WAS | 0.50862 | 1 | 9355 | −1.3472 |
| | Abundance (Late | | | | | |
| | vs Early) | | | | | |
| CRISPRa | CD19 CAR | FOXO6 | 0.51743 | 1 | 9529 | −0.51883 |
| | Abundance (Late | | | | | |
| | vs Early) | | | | | |
| CRISPRa | CD19 CAR | CUL3 | 0.5228 | 1 | 9636 | −0.15685 |
| | Abundance (Late | | | | | |
| | vs Early) | | | | | |
| CRISPRa | CD19 CAR | FOXL2 | 0.69698 | 1 | 12854 | −0.71876 |
| | Abundance (Late | | | | | |
| | vs Early) | | | | | |
| CRISPRa | CD19 CAR | NPM3 | 0.71241 | 1 | 13151 | −0.44266 |
| | Abundance (Late | | | | | |
| | vs Early) | | | | | |
| CRISPRa | CD19 CAR | ITPKB | 0.77927 | 1 | 14473 | 0.228 |
| | Abundance (Late | | | | | |
| | vs Early) | | | | | |
| CRISPRa | CD19 CAR | GLI2 | 0.86724 | 1 | 16259 | −0.071686 |
| | Abundance (Late | | | | | |
| | vs Early) | | | | | |
| CRISPRa | CD19 CAR | PTEN | 0.88188 | 1 | 16505 | −0.64299 |
| | Abundance (Late | | | | | |
| | vs Early) | | | | | |
| CRISPRa | CD19 CAR | PLEKHH3 | 0.92066 | 1 | 17227 | −0.28972 |
| | Abundance (Late | | | | | |
| | vs Early) | | | | | |
| CRISPRa | CD19 CAR | RFLNB | 0.96222 | 1 | 18079 | −0.36439 |
| | Abundance (Late | | | | | |
| | vs Early) | | | | | |
| CRISPRa | CD19 CAR | TMEM167B | 0.97524 | 1 | 18355 | −0.57958 |
| | Abundance (Late | | | | | |
| | vs Early) | | | | | |
| CRISPRa | CD19 CAR | INPP5D | 0.98673 | 1 | 18580 | −0.30181 |
| | Abundance (Late | | | | | |
| | vs Early) | | | | | |
| CRISPRa | CD19 CAR | VAV1 | 0.98979 | 1 | 18661 | −1.3953 |
| | Abundance (Late | | | | | |
| | vs Early) | | | | | |
| CRISPRa | CD19 CAR | KLLN | 0.99476 | 1 | 18782 | −0.79962 |
| | Abundance (Late | | | | | |
| | vs Early) | | | | | |
| CRISPRa | CD19 CAR | FOXO4 | 0.99997 | 1 | 18930 | −2.1051 |
| | Abundance (Late | | | | | |
| | vs Early) | | | | | |
| CRISPRa | GD2 CAR vs CD19 | FOXL2NB | 2.62E−07 | 9.90E−04 | 1 | 7.3568 |
| | CAR (Late | | | | | |
| | Timepoints) | | | | | |
| CRISPRa | GD2 CAR vs CD19 | FOXO6 | 2.62E−07 | 9.90E−04 | 2 | 3.6108 |
| | CAR (Late | | | | | |
| | Timepoints) | | | | | |
| CRISPRa | GD2 CAR vs CD19 | FOXO4 | 2.62E−07 | 9.90E−04 | 3 | 4.7811 |
| | CAR (Late | | | | | |
| | Timepoints) | | | | | |
| CRISPRa | GD2 CAR vs CD19 | EOMES | 2.62E−07 | 9.90E−04 | 4 | 2.232 |
| | CAR (Late | | | | | |
| | Timepoints) | | | | | |
| CRISPRa | GD2 CAR vs CD19 | IRF4 | 2.62E−07 | 9.90E−04 | 5 | 2.9741 |
| | CAR (Late | | | | | |
| | Timepoints) | | | | | |
| CRISPRa | GD2 CAR vs CD19 | FOXL2 | 4.97E−06 | 0.013437 | 6 | 2.6298 |
| | CAR (Late | | | | | |
| | Timepoints) | | | | | |
| CRISPRa | GD2 CAR vs CD19 | IL2RA | 4.97E−06 | 0.013437 | 7 | 2.1679 |
| | CAR (Late | | | | | |
| | Timepoints) | | | | | |
| CRISPRa | GD2 CAR vs CD19 | HOXB13 | 7.06E−06 | 0.015347 | 8 | 1.5123 |
| | CAR (Late | | | | | |
| | Timepoints) | | | | | |
| CRISPRa | GD2 CAR vs CD19 | KLLN | 8.11E−06 | 0.015347 | 9 | 2.0409 |
| | CAR (Late | | | | | |
| | Timepoints) | | | | | |
| CRISPRa | GD2 CAR vs CD19 | IL2RB | 1.33E−05 | 0.022952 | 10 | 2.1246 |
| | CAR (Late | | | | | |
| | Timepoints) | | | | | |
| CRISPRa | GD2 CAR vs CD19 | PTEN | 7.32E−06 | 0.015347 | 11 | 2.6207 |
| | CAR (Late | | | | | |
| | Timepoints) | | | | | |
| CRISPRa | GD2 CAR vs CD19 | CUL3 | 2.59E−05 | 0.040842 | 12 | 1.8886 |
| | CAR (Late | | | | | |
| | Timepoints) | | | | | |
| CRISPRa | GD2 CAR vs CD19 | TRMT44 | 3.79E−05 | 0.055217 | 13 | 0.63134 |
| | CAR (Late | | | | | |
| | Timepoints) | | | | | |
| CRISPRa | GD2 CAR vs CD19 | RFLNB | 4.13E−05 | 0.05587 | 14 | 0.53646 |
| | CAR (Late | | | | | |
| | Timepoints) | | | | | |
| CRISPRa | GD2 CAR vs CD19 | INPP5D | 6.51E−05 | 0.082178 | 15 | 1.7893 |
| | CAR (Late | | | | | |
| | Timepoints) | | | | | |
| CRISPRa | GD2 CAR vs CD19 | S100A13 | 7.45E−05 | 0.088181 | 16 | −0.32981 |
| | CAR (Late | | | | | |
| | Timepoints) | | | | | |
| CRISPRa | GD2 CAR vs CD19 | WAS | 7.98E−05 | 0.088818 | 17 | 2.1546 |
| | CAR (Late | | | | | |
| | Timepoints) | | | | | |
| CRISPRa | GD2 CAR vs CD19 | VAV1 | 8.60E−05 | 0.090484 | 18 | 2.2124 |
| | CAR (Late | | | | | |
| | Timepoints) | | | | | |
| CRISPRa | GD2 CAR vs CD19 | NPM3 | 1.01E−04 | 0.100834 | 19 | 1.8164 |
| | CAR (Late | | | | | |
| | Timepoints) | | | | | |
| CRISPRa | GD2 CAR vs CD19 | GLI2 | 1.09E−04 | 0.103218 | 20 | 1.9646 |
| | CAR (Late | | | | | |
| | Timepoints) | | | | | |
| CRISPRa | GD2 CAR vs CD19 | ZNF211 | 1.36E−04 | 0.122348 | 21 | 1.4239 |
| | CAR (Late | | | | | |
| | Timepoints) | | | | | |
| CRISPRa | GD2 CAR vs CD19 | STAT5A | 1.52E−04 | 0.125484 | 22 | 1.4424 |
| | CAR (Late | | | | | |
| | Timepoints) | | | | | |
| CRISPRa | GD2 CAR vs CD19 | ITPKA | 2.04E−04 | 0.148324 | 25 | 1.3751 |
| | CAR (Late | | | | | |
| | Timepoints) | | | | | |
| CRISPRa | GD2 CAR vs CD19 | GLIS3 | 2.65E−04 | 0.167492 | 30 | 1.6781 |
| | CAR (Late | | | | | |
| | Timepoints) | | | | | |
| CRISPRa | GD2 CAR vs CD19 | FOSB | 3.53E−04 | 0.20237 | 33 | 1.6741 |
| | CAR (Late | | | | | |
| | Timepoints) | | | | | |
| CRISPRa | GD2 CAR vs CD19 | CDKL3 | 3.91E−04 | 0.210534 | 34 | 0.53482 |
| | CAR (Late | | | | | |
| | Timepoints) | | | | | |
| CRISPRa | GD2 CAR vs CD19 | CLASRP | 6.12E−04 | 0.276403 | 39 | 0.067064 |
| | CAR (Late | | | | | |
| | Timepoints) | | | | | |
| CRISPRa | GD2 CAR vs CD19 | TMEM167B | 8.83E−04 | 0.310139 | 51 | 1.414 |
| | CAR (Late | | | | | |
| | Timepoints) | | | | | |
| CRISPRa | GD2 CAR vs CD19 | PLEKHH3 | 9.70E−04 | 0.326993 | 55 | 1.5438 |
| | CAR (Late | | | | | |
| | Timepoints) | | | | | |
| CRISPRa | GD2 CAR vs CD19 | LIFR | 0.001074 | 0.344605 | 59 | 0.85166 |
| | CAR (Late | | | | | |
| | Timepoints) | | | | | |
| CRISPRa | GD2 CAR vs CD19 | SHOC2 | 0.0013643 | 0.3743 | 69 | 1.1815 |
| | CAR (Late | | | | | |
| | Timepoints) | | | | | |
| CRISPRa | GD2 CAR vs CD19 | FOSL1 | 0.001915 | 0.4265 | 85 | 1.1054 |
| | CAR (Late | | | | | |
| | Timepoints) | | | | | |
| CRISPRa | GD2 CAR vs CD19 | BATF | 0.0030609 | 0.499276 | 111 | 0.92451 |
| | CAR (Late | | | | | |
| | Timepoints) | | | | | |
| CRISPRa | GD2 CAR vs CD19 | TRAF3IP2 | 0.0034181 | 0.500756 | 125 | 1.17 |
| | CAR (Late | | | | | |
| | Timepoints) | | | | | |
| CRISPRa | GD2 CAR vs CD19 | IL10 | 0.005895 | 0.606516 | 183 | 1.49 |
| | CAR (Late | | | | | |
| | Timepoints) | | | | | |
| CRISPRa | GD2 CAR vs CD19 | ITPKB | 0.0096513 | 0.720495 | 249 | 1.0508 |
| | CAR (Late | | | | | |
| | Timepoints) | | | | | |
| CRISPRa | GD2 CAR vs CD19 | LYN | 0.010237 | 0.731091 | 264 | 0.95793 |
| | CAR (Late | | | | | |
| | Timepoints) | | | | | |
| CRISPRa | GD2 CAR vs CD19 | TSR2 | 0.068751 | 0.937125 | 1375 | 0.5019 |
| | CAR (Late | | | | | |
| | Timepoints) | | | | | |
| CRISPRa | GD2 CAR vs CD19 | LCK | 0.12509 | 0.979525 | 2396 | 0.55557 |
| | CAR (Late | | | | | |
| | Timepoints) | | | | | |
| CRISPRa | GD2 CAR vs CD19 | NQO1 | 0.25357 | 0.999484 | 4769 | 0.13742 |
| | CAR (Late | | | | | |
| | Timepoints) | | | | | |
| CRISPRa | GD2 CAR vs CD19 | IL9R | 0.35451 | 0.999979 | 6633 | 0.11288 |
| | CAR (Late | | | | | |
| | Timepoints) | | | | | |
| CRISPRi | GD2 CAR | MED12 | 2.61E−07 | 8.25E−04 | 1 | 2.9426 |
| | Abundance (Late | | | | | |
| | vs Early) | | | | | |
| CRISPRi | GD2 CAR | MED24 | 2.61E−07 | 8.25E−04 | 2 | 2.3794 |
| | Abundance (Late | | | | | |
| | vs Early) | | | | | |
| CRISPRi | GD2 CAR | ELOB | 2.61E−07 | 8.25E−04 | 3 | 1.791 |
| | Abundance (Late | | | | | |
| | vs Early) | | | | | |
| CRISPRi | GD2 CAR | MED13 | 2.61E−07 | 8.25E−04 | 4 | 1.287 |
| | Abundance (Late | | | | | |
| | vs Early) | | | | | |
| CRISPRi | GD2 CAR | RNF7 | 2.61E−07 | 8.25E−04 | 5 | 2.0741 |
| | Abundance (Late | | | | | |
| | vs Early) | | | | | |
| CRISPRi | GD2 CAR | CCNC | 2.61E−07 | 8.25E−04 | 6 | 2.0715 |
| | Abundance (Late | | | | | |
| | vs Early) | | | | | |
| CRISPRi | GD2 CAR | ELOC | 3.40E−06 | 0.009194 | 7 | 1.2128 |
| | Abundance (Late | | | | | |
| | vs Early) | | | | | |
| CRISPRi | GD2 CAR | SYCE1L | 7.58E−06 | 0.017052 | 8 | 1.1361 |
| | Abundance (Late | | | | | |
| | vs Early) | | | | | |
| CRISPRi | GD2 CAR | ATF7IP2 | 8.10E−06 | 0.017052 | 9 | 1.5047 |
| | Abundance (Late | | | | | |
| | vs Early) | | | | | |
| CRISPRi | GD2 CAR | SYTL2 | 1.02E−05 | 0.019307 | 10 | 1.2432 |
| | Abundance (Late | | | | | |
| | vs Early) | | | | | |
| CRISPRi | GD2 CAR | PRDM14 | 1.54E−05 | 0.026553 | 11 | 1.1576 |
| | Abundance (Late | | | | | |
| | vs Early) | | | | | |
| CRISPRi | GD2 CAR | NQO2 | 1.99E−05 | 0.031353 | 12 | 1.0288 |
| | Abundance (Late | | | | | |
| | vs Early) | | | | | |
| CRISPRi | GD2 CAR | SRRD | 3.06E−05 | 0.044554 | 13 | 1.0681 |
| | Abundance (Late | | | | | |
| | vs Early) | | | | | |
| CRISPRi | GD2 CAR | IGFL4 | 4.31E−05 | 0.054455 | 14 | 0.70046 |
| | Abundance (Late | | | | | |
| | vs Early) | | | | | |
| CRISPRi | GD2 CAR | SPIN1 | 4.31E−05 | 0.054455 | 15 | 1.4964 |
| | Abundance (Late | | | | | |
| | vs Early) | | | | | |
| CRISPRi | GD2 CAR | UBE2E1 | 5.78E−05 | 0.068379 | 16 | 1.2381 |
| | Abundance (Late | | | | | |
| | vs Early) | | | | | |
| CRISPRi | GD2 CAR | MN1 | 6.77E−05 | 0.074505 | 17 | 0.94298 |
| | Abundance (Late | | | | | |
| | vs Early) | | | | | |
| CRISPRi | GD2 CAR | MED1 | 7.19E−05 | 0.074505 | 18 | 1.5292 |
| | Abundance (Late | | | | | |
| | vs Early) | | | | | |
| CRISPRi | GD2 CAR | KIAA1551 | 7.50E−05 | 0.074505 | 19 | 1.2184 |
| | Abundance (Late | | | | | |
| | vs Early) | | | | | |
| CRISPRi | GD2 CAR | MEOX1 | 7.87E−05 | 0.074505 | 20 | 0.99518 |
| | Abundance (Late | | | | | |
| | vs Early) | | | | | |
| CRISPRi | GD2 CAR | MOCS3 | 8.91E−05 | 0.080387 | 21 | −0.11395 |
| | Abundance (Late | | | | | |
| | vs Early) | | | | | |
| CRISPRi | GD2 CAR | MED19 | 1.12E−04 | 0.096535 | 22 | 0.98363 |
| | Abundance (Late | | | | | |
| | vs Early) | | | | | |
| CRISPRi | GD2 CAR | UBAP2L | 1.89E−04 | 0.119307 | 30 | 1.348 |
| | Abundance (Late | | | | | |
| | vs Early) | | | | | |
| CRISPRi | GD2 CAR | ARHGAP5 | 3.67E−04 | 0.170611 | 39 | 0.99407 |
| | Abundance (Late | | | | | |
| | vs Early) | | | | | |
| CRISPRi | GD2 CAR | PDCL | 4.83E−04 | 0.212871 | 43 | 0.91418 |
| | Abundance (Late | | | | | |
| | vs Early) | | | | | |
| CRISPRi | GD2 CAR | CAND1 | 7.42E−04 | 0.263935 | 52 | 1.2963 |
| | Abundance (Late | | | | | |
| | vs Early) | | | | | |
| CRISPRi | GD2 CAR | PIK3R5 | 0.0016114 | 0.331737 | 92 | 0.7121 |
| | Abundance (Late | | | | | |
| | vs Early) | | | | | |
| CRISPRi | GD2 CAR | COPS7B | 0.0021378 | 0.35622 | 112 | 1.0581 |
| | Abundance (Late | | | | | |
| | vs Early) | | | | | |
| CRISPRi | GD2 CAR | DCUN1D3 | 0.0042555 | 0.475677 | 168 | 0.6781 |
| | Abundance (Late | | | | | |
| | vs Early) | | | | | |
| CRISPRi | GD2 CAR | ZMYND8 | 0.0056528 | 0.491229 | 217 | 0.79917 |
| | Abundance (Late | | | | | |
| | vs Early) | | | | | |
| CRISPRi | GD2 CAR | CASP3 | 0.0069947 | 0.523963 | 250 | 0.74159 |
| | Abundance (Late | | | | | |
| | vs Early) | | | | | |
| CRISPRi | GD2 CAR | CBFB | 0.0092661 | 0.571661 | 307 | 0.49309 |
| | Abundance (Late | | | | | |
| | vs Early) | | | | | |
| CRISPRi | GD2 CAR | CDKN2A | 0.010555 | 0.593317 | 334 | 0.11609 |
| | Abundance (Late | | | | | |
| | vs Early) | | | | | |
| CRISPRi | GD2 CAR | ARIH2 | 0.013739 | 0.645397 | 401 | 0.67785 |
| | Abundance (Late | | | | | |
| | vs Early) | | | | | |
| CRISPRi | GD2 CAR | MED23 | 0.015404 | 0.649033 | 439 | 0.63034 |
| | Abundance (Late | | | | | |
| | vs Early) | | | | | |
| CRISPRi | GD2 CAR | UBE2L3 | 0.016092 | 0.652649 | 465 | 0.75702 |
| | Abundance (Late | | | | | |
| | vs Early) | | | | | |
| CRISPRi | GD2 CAR | CUL5 | 0.021043 | 0.695407 | 567 | 0.50595 |
| | Abundance (Late | | | | | |
| | vs Early) | | | | | |
| CRISPRi | GD2 CAR | RPS6KA1 | 0.026899 | 0.723709 | 691 | 0.45284 |
| | Abundance (Late | | | | | |
| | vs Early) | | | | | |
| CRISPRi | GD2 CAR | UBE2F | 0.032155 | 0.723709 | 824 | 0.66653 |
| | Abundance (Late | | | | | |
| | vs Early) | | | | | |
| CRISPRi | GD2 CAR | KRTAP10-9 | 0.036118 | 0.723709 | 940 | 0.28258 |
| | Abundance (Late | | | | | |
| | vs Early) | | | | | |
| CRISPRi | GD2 CAR | MYB | 0.036677 | 0.723709 | 953 | 0.66622 |
| | Abundance (Late | | | | | |
| | vs Early) | | | | | |
| CRISPRi | GD2 CAR | NFKBIA | 0.051646 | 0.739919 | 1317 | 0.24236 |
| | Abundance (Late | | | | | |
| | vs Early) | | | | | |
| CRISPRi | GD2 CAR | MAPKAP1 | 0.069723 | 0.795714 | 1655 | 0.60013 |
| | Abundance (Late | | | | | |
| | vs Early) | | | | | |
| CRISPRi | GD2 CAR | SND1 | 0.11108 | 0.874066 | 2401 | 0.10428 |
| | Abundance (Late | | | | | |
| | vs Early) | | | | | |
| CRISPRi | GD2 CAR | KDM5C | 0.14344 | 0.900048 | 3002 | 0.29829 |
| | Abundance (Late | | | | | |
| | vs Early) | | | | | |
| CRISPRi | GD2 CAR | PAK2 | 0.15527 | 0.915227 | 3198 | −0.17378 |
| | Abundance (Late | | | | | |
| | vs Early) | | | | | |
| CRISPRi | GD2 CAR | WDFY1 | 0.16779 | 0.924842 | 3418 | 0.23697 |
| | Abundance (Late | | | | | |
| | vs Early) | | | | | |
| CRISPRi | GD2 CAR | DDA1 | 0.16996 | 0.927439 | 3455 | 0.25216 |
| | Abundance (Late | | | | | |
| | vs Early) | | | | | |
| CRISPRi | GD2 CAR | CISH | 0.20033 | 0.937164 | 4028 | 0.28205 |
| | Abundance (Late | | | | | |
| | vs Early) | | | | | |
| CRISPRi | GD2 CAR | CDK13 | 0.2034 | 0.937164 | 4088 | 0.32304 |
| | Abundance (Late | | | | | |
| | vs Early) | | | | | |
| CRISPRi | GD2 CAR | RNASE9 | 0.20733 | 0.937164 | 4170 | 0.22583 |
| | Abundance (Late | | | | | |
| | vs Early) | | | | | |
| CRISPRi | GD2 CAR | MADD | 0.22466 | 0.941802 | 4495 | 0.11272 |
| | Abundance (Late | | | | | |
| | vs Early) | | | | | |
| CRISPRi | GD2 CAR | CFAP54 | 0.28774 | 0.961372 | 5652 | 0.092835 |
| | Abundance (Late | | | | | |
| | vs Early) | | | | | |
| CRISPRi | GD2 CAR | BORCS8 | 0.29786 | 0.968496 | 5812 | 0.045025 |
| | Abundance (Late | | | | | |
| | vs Early) | | | | | |
| CRISPRi | GD2 CAR | RASA2 | 0.31292 | 0.969483 | 6087 | −0.25412 |
| | Abundance (Late | | | | | |
| | vs Early) | | | | | |
| CRISPRi | GD2 CAR | ATF7IP | 0.31476 | 0.969483 | 6121 | 0.24421 |
| | Abundance (Late | | | | | |
| | vs Early) | | | | | |
| CRISPRi | GD2 CAR | TSPEAR | 0.33153 | 0.973136 | 6434 | −0.005439 |
| | Abundance (Late | | | | | |
| | vs Early) | | | | | |
| CRISPRi | GD2 CAR | CPSF4L | 0.42658 | 0.995487 | 8099 | −0.038094 |
| | Abundance (Late | | | | | |
| | vs Early) | | | | | |
| CRISPRi | GD2 CAR | MYO5A | 0.43256 | 0.996044 | 8205 | −0.61462 |
| | Abundance (Late | | | | | |
| | vs Early) | | | | | |
| CRISPRi | GD2 CAR | ST8SIA5 | 0.54516 | 1 | 10110 | −0.025488 |
| | Abundance (Late | | | | | |
| | vs Early) | | | | | |
| CRISPRi | GD2 CAR | TRIM56 | 0.60903 | 1 | 11114 | −0.027877 |
| | Abundance (Late | | | | | |
| | vs Early) | | | | | |
| CRISPRi | GD2 CAR | PTEN | 0.67164 | 1 | 12122 | −0.42536 |
| | Abundance (Late | | | | | |
| | vs Early) | | | | | |
| CRISPRi | GD2 CAR | ATXN7L3 | 0.7214 | 1 | 12940 | −0.064123 |
| | Abundance (Late | | | | | |
| | vs Early) | | | | | |
| CRISPRi | GD2 CAR | SBNO2 | 0.7555 | 1 | 13532 | 0.11285 |
| | Abundance (Late | | | | | |
| | vs Early) | | | | | |
| CRISPRi | GD2 CAR | TNIP1 | 0.76876 | 1 | 13777 | −0.25136 |
| | Abundance (Late | | | | | |
| | vs Early) | | | | | |
| CRISPRi | GD2 CAR | GABARAPL1 | 0.81012 | 1 | 14484 | −0.59137 |
| | Abundance (Late | | | | | |
| | vs Early) | | | | | |
| CRISPRi | GD2 CAR | CUTA | 0.837 | 1 | 14940 | −0.4818 |
| | Abundance (Late | | | | | |
| | vs Early) | | | | | |
| CRISPRi | GD2 CAR | ARIH1 | 0.93026 | 1 | 16540 | −0.33117 |
| | Abundance (Late | | | | | |
| | vs Early) | | | | | |
| CRISPRi | GD2 CAR | ZBTB21 | 0.98245 | 1 | 17590 | −0.22637 |
| | Abundance (Late | | | | | |
| | vs Early) | | | | | |
| CRISPRi | CD19 CAR | CAND1 | 2.61E−07 | 7.07E−04 | 1 | 1.5189 |
| | Abundance (Late | | | | | |
| | vs Early) | | | | | |
| CRISPRi | CD19 CAR | ZMYND8 | 2.61E−07 | 7.07E−04 | 2 | 1.1731 |
| | Abundance (Late | | | | | |
| | vs Early) | | | | | |
| CRISPRi | CD19 CAR | MYB | 2.61E−07 | 7.07E−04 | 3 | 1.6399 |
| | Abundance (Late | | | | | |
| | vs Early) | | | | | |
| CRISPRi | CD19 CAR | PTEN | 2.61E−07 | 7.07E−04 | 4 | 0.89151 |
| | Abundance (Late | | | | | |
| | vs Early) | | | | | |
| CRISPRi | CD19 CAR | UBE2L3 | 2.61E−07 | 7.07E−04 | 5 | 1.3309 |
| | Abundance (Late | | | | | |
| | vs Early) | | | | | |
| CRISPRi | CD19 CAR | DCUN1D3 | 2.61E−07 | 7.07E−04 | 6 | 0.95612 |
| | Abundance (Late | | | | | |
| | vs Early) | | | | | |
| CRISPRi | CD19 CAR | MED24 | 2.61E−07 | 7.07E−04 | 7 | 1.1109 |
| | Abundance (Late | | | | | |
| | vs Early) | | | | | |
| CRISPRi | CD19 CAR | ATXN7L3 | 1.31E−06 | 0.003094 | 8 | 0.83806 |
| | Abundance (Late | | | | | |
| | vs Early) | | | | | |
| CRISPRi | CD19 CAR | RNF7 | 1.83E−06 | 0.00385 | 9 | 1.0459 |
| | Abundance (Late | | | | | |
| | vs Early) | | | | | |
| CRISPRi | CD19 CAR | MED23 | 2.88E−06 | 0.00495 | 10 | 0.68605 |
| | Abundance (Late | | | | | |
| | vs Early) | | | | | |
| CRISPRi | CD19 CAR | UBAP2L | 2.88E−06 | 0.00495 | 11 | 0.90127 |
| | Abundance (Late | | | | | |
| | vs Early) | | | | | |
| CRISPRi | CD19 CAR | CISH | 4.44E−06 | 0.007013 | 12 | 0.97991 |
| | Abundance (Late | | | | | |
| | vs Early) | | | | | |
| CRISPRi | CD19 CAR | ATF7IP | 4.97E−06 | 0.007235 | 13 | 0.82507 |
| | Abundance (Late | | | | | |
| | vs Early) | | | | | |
| CRISPRi | CD19 CAR | CDKN2A | 6.53E−06 | 0.00884 | 14 | 0.94598 |
| | Abundance (Late | | | | | |
| | vs Early) | | | | | |
| CRISPRi | CD19 CAR | RASA2 | 7.58E−06 | 0.009571 | 15 | 0.90347 |
| | Abundance (Late | | | | | |
| | vs Early) | | | | | |
| CRISPRi | CD19 CAR | UBE2F | 8.63E−06 | 0.010192 | 16 | 0.67293 |
| | Abundance (Late | | | | | |
| | vs Early) | | | | | |
| CRISPRi | CD19 CAR | COPS7B | 9.15E−06 | 0.010192 | 17 | 0.72803 |
| | Abundance (Late | | | | | |
| | vs Early) | | | | | |
| CRISPRi | CD19 CAR | KIAA1551 | 1.02E−05 | 0.010726 | 18 | 0.83951 |
| | Abundance (Late | | | | | |
| | vs Early) | | | | | |
| CRISPRi | CD19 CAR | RPS6KA1 | 1.23E−05 | 0.012246 | 19 | 0.86299 |
| | Abundance (Late | | | | | |
| | vs Early) | | | | | |
| CRISPRi | CD19 CAR | ARIH1 | 1.49E−05 | 0.014109 | 20 | 0.66062 |
| | Abundance (Late | | | | | |
| | vs Early) | | | | | |
| CRISPRi | CD19 CAR | TRIM56 | 3.53E−05 | 0.030378 | 21 | 0.69375 |
| | Abundance (Late | | | | | |
| | vs Early) | | | | | |
| CRISPRi | CD19 CAR | CUL5 | 3.53E−05 | 0.030378 | 22 | 1.0064 |
| | Abundance (Late | | | | | |
| | vs Early) | | | | | |
| CRISPRi | CD19 CAR | TNIP1 | 4.08E−05 | 0.033577 | 23 | 0.90498 |
| | Abundance (Late | | | | | |
| | vs Early) | | | | | |
| CRISPRi | CD19 CAR | PAK2 | 4.37E−05 | 0.034447 | 24 | 0.69053 |
| | Abundance (Late | | | | | |
| | vs Early) | | | | | |
| CRISPRi | CD19 CAR | TSPEAR | 4.57E−05 | 0.034653 | 25 | 0.80196 |
| | Abundance (Late | | | | | |
| | vs Early) | | | | | |
| CRISPRi | CD19 CAR | GABARAPL1 | 6.19E−05 | 0.045126 | 26 | 0.83669 |
| | Abundance (Late | | | | | |
| | vs Early) | | | | | |
| CRISPRi | CD19 CAR | SND1 | 6.93E−05 | 0.047914 | 27 | 0.62949 |
| | Abundance (Late | | | | | |
| | vs Early) | | | | | |
| CRISPRi | CD19 CAR | ZBTB21 | 7.08E−05 | 0.047914 | 28 | 0.84518 |
| | Abundance (Late | | | | | |
| | vs Early) | | | | | |
| CRISPRi | CD19 CAR | MYO5A | 7.97E−05 | 0.052066 | 29 | 0.20955 |
| | Abundance (Late | | | | | |
| | vs Early) | | | | | |
| CRISPRi | CD19 CAR | RNASE9 | 8.29E−05 | 0.05231 | 30 | 0.62712 |
| | Abundance (Late | | | | | |
| | vs Early) | | | | | |
| CRISPRi | CD19 CAR | CASP3 | 9.28E−05 | 0.055538 | 31 | 0.67113 |
| | Abundance (Late | | | | | |
| | vs Early) | | | | | |
| CRISPRi | CD19 CAR | WDFY1 | 9.38E−05 | 0.055538 | 32 | 0.71215 |
| | Abundance (Late | | | | | |
| | vs Early) | | | | | |
| CRISPRi | CD19 CAR | DDA1 | 9.96E−05 | 0.057156 | 33 | 0.86491 |
| | Abundance (Late | | | | | |
| | vs Early) | | | | | |
| CRISPRi | CD19 CAR | KDM5C | 1.07E−04 | 0.059843 | 34 | 0.62538 |
| | Abundance (Late | | | | | |
| | vs Early) | | | | | |
| CRISPRi | CD19 CAR | KRTAP10-9 | 1.24E−04 | 0.066144 | 35 | 0.6586 |
| | Abundance (Late | | | | | |
| | vs Early) | | | | | |
| CRISPRi | CD19 CAR | NFKBIA | 1.26E−04 | 0.066144 | 36 | 0.47723 |
| | Abundance (Late | | | | | |
| | vs Early) | | | | | |
| CRISPRi | CD19 CAR | CUTA | 1.37E−04 | 0.070377 | 37 | 0.26446 |
| | Abundance (Late | | | | | |
| | vs Early) | | | | | |
| CRISPRi | CD19 CAR | CPSF4L | 1.44E−04 | 0.071782 | 38 | 0.48111 |
| | Abundance (Late | | | | | |
| | vs Early) | | | | | |
| CRISPRi | CD19 CAR | BORCS8 | 1.52E−04 | 0.072153 | 39 | 0.59696 |
| | Abundance (Late | | | | | |
| | vs Early) | | | | | |
| CRISPRi | CD19 CAR | ARIH2 | 1.52E−04 | 0.072153 | 40 | 0.76093 |
| | Abundance (Late | | | | | |
| | vs Early) | | | | | |
| CRISPRi | CD19 CAR | ATF7IP2 | 1.60E−04 | 0.074016 | 41 | 0.48327 |
| | Abundance (Late | | | | | |
| | vs Early) | | | | | |
| CRISPRi | CD19 CAR | CFAP54 | 2.00E−04 | 0.087421 | 42 | 0.62074 |
| | Abundance (Late | | | | | |
| | vs Early) | | | | | |
| CRISPRi | CD19 CAR | SBNO2 | 2.01E−04 | 0.087421 | 43 | −0.020683 |
| | Abundance (Late | | | | | |
| | vs Early) | | | | | |
| CRISPRi | CD19 CAR | CDK13 | 2.03E−04 | 0.087421 | 44 | 0.78939 |
| | Abundance (Late | | | | | |
| | vs Early) | | | | | |
| CRISPRi | CD19 CAR | ST8SIA5 | 2.23E−04 | 0.094059 | 45 | 0.79382 |
| | Abundance (Late | | | | | |
| | vs Early) | | | | | |
| CRISPRi | CD19 CAR | MADD | 2.37E−04 | 0.097611 | 46 | 0.12178 |
| | Abundance (Late | | | | | |
| | vs Early) | | | | | |
| CRISPRi | CD19 CAR | UBE2E1 | 3.78E−04 | 0.140264 | 51 | 0.60988 |
| | Abundance (Late | | | | | |
| | vs Early) | | | | | |
| CRISPRi | CD19 CAR | ELOC | 0.0029491 | 0.419973 | 133 | 0.45709 |
| | Abundance (Late | | | | | |
| | vs Early) | | | | | |
| CRISPRi | CD19 CAR | ELOB | 0.054652 | 0.775903 | 1325 | 0.15537 |
| | Abundance (Late | | | | | |
| | vs Early) | | | | | |
| CRISPRi | CD19 CAR | MED13 | 0.065851 | 0.787657 | 1579 | 0.2954 |
| | Abundance (Late | | | | | |
| | vs Early) | | | | | |
| CRISPRi | CD19 CAR | SYCE1L | 0.085379 | 0.827767 | 1950 | 0.25724 |
| | Abundance (Late | | | | | |
| | vs Early) | | | | | |
| CRISPRi | CD19 CAR | SRRD | 0.17396 | 0.92009 | 3565 | 0.28341 |
| | Abundance (Late | | | | | |
| | vs Early) | | | | | |
| CRISPRi | CD19 CAR | SPIN1 | 0.29629 | 0.974907 | 5735 | 0.21204 |
| | Abundance (Late | | | | | |
| | vs Early) | | | | | |
| CRISPRi | CD19 CAR | ARHGAP5 | 0.38231 | 0.997751 | 7235 | −0.072974 |
| | Abundance (Late | | | | | |
| | vs Early) | | | | | |
| CRISPRi | CD19 CAR | SYTL2 | 0.59476 | 1 | 10833 | −0.17737 |
| | Abundance (Late | | | | | |
| | vs Early) | | | | | |
| CRISPRi | CD19 CAR | MEOX1 | 0.60232 | 1 | 10960 | −0.15922 |
| | Abundance (Late | | | | | |
| | vs Early) | | | | | |
| CRISPRi | CD19 CAR | IGFL4 | 0.67206 | 1 | 12106 | 0.092701 |
| | Abundance (Late | | | | | |
| | vs Early) | | | | | |
| CRISPRi | CD19 CAR | PRDM14 | 0.68781 | 1 | 12370 | 0.14768 |
| | Abundance (Late | | | | | |
| | vs Early) | | | | | |
| CRISPRi | CD19 CAR | NQO2 | 0.75395 | 1 | 13415 | −0.30445 |
| | Abundance (Late | | | | | |
| | vs Early) | | | | | |
| CRISPRi | CD19 CAR | MOCS3 | 0.79295 | 1 | 14063 | −0.64525 |
| | Abundance (Late | | | | | |
| | vs Early) | | | | | |
| CRISPRi | CD19 CAR | MED19 | 0.8201 | 1 | 14493 | −0.06066 |
| | Abundance (Late | | | | | |
| | vs Early) | | | | | |
| CRISPRi | CD19 CAR | MN1 | 0.82438 | 1 | 14566 | 0.017534 |
| | Abundance (Late | | | | | |
| | vs Early) | | | | | |
| CRISPRi | CD19 CAR | MED1 | 0.88941 | 1 | 15687 | −0.038942 |
| | Abundance (Late | | | | | |
| | vs Early) | | | | | |
| CRISPRi | CD19 CAR | PIK3R5 | 0.97192 | 1 | 17257 | −0.79911 |
| | Abundance (Late | | | | | |
| | vs Early) | | | | | |
| CRISPRi | CD19 CAR | MED12 | 0.98688 | 1 | 17593 | −0.54253 |
| | Abundance (Late | | | | | |
| | vs Early) | | | | | |
| CRISPRi | CD19 CAR | PDCL | 0.99193 | 1 | 17741 | −0.652 |
| | Abundance (Late | | | | | |
| | vs Early) | | | | | |
| CRISPRi | CD19 CAR | CCNC | 0.99195 | 1 | 17742 | −0.36683 |
| | Abundance (Late | | | | | |
| | vs Early) | | | | | |
| CRISPRi | CD19 CAR | CBFB | 0.99209 | 1 | 17746 | −1.6667 |
| | Abundance (Late | | | | | |
| | vs Early) | | | | | |
| CRISPRi | CD19 CAR | MAPKAP1 | 0.99999 | 1 | 18515 | −1.2037 |
| | Abundance (Late | | | | | |
| | vs Early) | | | | | |
| CRISPRi | GD2 CAR vs CD19 | MED12 | 2.61E−07 | 0.001238 | 1 | 3.8456 |
| | CAR (Late | | | | | |
| | Timepoints) | | | | | |
| CRISPRi | GD2 CAR vs CD19 | PDCL | 2.61E−07 | 0.001238 | 2 | 1.7441 |
| | CAR (Late | | | | | |
| | Timepoints) | | | | | |
| CRISPRi | GD2 CAR vs CD19 | CCNC | 2.61E−07 | 0.001238 | 3 | 2.1345 |
| | CAR (Late | | | | | |
| | Timepoints) | | | | | |
| CRISPRi | GD2 CAR vs CD19 | CBFB | 2.61E−07 | 0.001238 | 4 | 2.3323 |
| | CAR (Late | | | | | |
| | Timepoints) | | | | | |
| CRISPRi | GD2 CAR vs CD19 | PIK3R5 | 2.88E−06 | 0.010891 | 5 | 1.294 |
| | CAR (Late | | | | | |
| | Timepoints) | | | | | |
| CRISPRi | GD2 CAR vs CD19 | MED19 | 5.49E−06 | 0.017327 | 6 | 1.3695 |
| | CAR (Late | | | | | |
| | Timepoints) | | | | | |
| CRISPRi | GD2 CAR vs CD19 | MAPKAP1 | 1.02E−05 | 0.024752 | 7 | 1.868 |
| | CAR (Late | | | | | |
| | Timepoints) | | | | | |
| CRISPRi | GD2 CAR vs CD19 | NQO2 | 1.18E−05 | 0.024752 | 8 | 1.0874 |
| | CAR (Late | | | | | |
| | Timepoints) | | | | | |
| CRISPRi | GD2 CAR vs CD19 | ARHGAP5 | 1.18E−05 | 0.024752 | 9 | 1.1095 |
| | CAR (Late | | | | | |
| | Timepoints) | | | | | |
| CRISPRi | GD2 CAR vs CD19 | ELOB | 1.59E−05 | 0.030153 | 10 | 1.5391 |
| | CAR (Late | | | | | |
| | Timepoints) | | | | | |
| CRISPRi | GD2 CAR vs CD19 | MOCS3 | 1.75E−05 | 0.030153 | 11 | 0.53863 |
| | CAR (Late | | | | | |
| | Timepoints) | | | | | |
| CRISPRi | GD2 CAR vs CD19 | MED13 | 2.01E−05 | 0.031766 | 12 | 0.84099 |
| | CAR (Late | | | | | |
| | Timepoints) | | | | | |
| CRISPRi | GD2 CAR vs CD19 | SRRD | 7.24E−05 | 0.105021 | 13 | 1.1248 |
| | CAR (Late | | | | | |
| | Timepoints) | | | | | |
| CRISPRi | GD2 CAR vs CD19 | PRDM14 | 7.76E−05 | 0.105021 | 14 | 1.0395 |
| | CAR (Late | | | | | |
| | Timepoints) | | | | | |
| CRISPRi | GD2 CAR vs CD19 | ELOC | 1.05E−04 | 0.132343 | 15 | 0.79173 |
| | CAR (Late | | | | | |
| | Timepoints) | | | | | |
| CRISPRi | GD2 CAR vs CD19 | MN1 | 1.21E−04 | 0.134246 | 17 | 0.84276 |
| | CAR (Late | | | | | |
| | Timepoints) | | | | | |
| CRISPRi | GD2 CAR vs CD19 | MED24 | 2.06E−04 | 0.200701 | 19 | 1.0934 |
| | CAR (Late | | | | | |
| | Timepoints) | | | | | |
| CRISPRi | GD2 CAR vs CD19 | MEOX1 | 2.54E−04 | 0.200701 | 23 | 1.2491 |
| | CAR (Late | | | | | |
| | Timepoints) | | | | | |
| CRISPRi | GD2 CAR vs CD19 | SYCE1L | 3.33E−04 | 0.242765 | 26 | 0.76905 |
| | CAR (Late | | | | | |
| | Timepoints) | | | | | |
| CRISPRi | GD2 CAR vs CD19 | SYTL2 | 6.26E−04 | 0.305603 | 37 | 0.80483 |
| | CAR (Late | | | | | |
| | Timepoints) | | | | | |
| CRISPRi | GD2 CAR vs CD19 | RNF7 | 7.10E−04 | 0.308416 | 42 | 0.78538 |
| | CAR (Late | | | | | |
| | Timepoints) | | | | | |
| CRISPRi | GD2 CAR vs CD19 | ATF7IP2 | 7.13E−04 | 0.308416 | 43 | 0.88511 |
| | CAR (Late | | | | | |
| | Timepoints) | | | | | |
| CRISPRi | GD2 CAR vs CD19 | UBE2E1 | 9.41E−04 | 0.342631 | 52 | 0.86235 |
| | CAR (Late | | | | | |
| | Timepoints) | | | | | |
| CRISPRi | GD2 CAR vs CD19 | MED1 | 0.0024786 | 0.469455 | 100 | 1.1692 |
| | CAR (Late | | | | | |
| | Timepoints) | | | | | |
| CRISPRi | GD2 CAR vs CD19 | SPIN1 | 0.0025215 | 0.472846 | 101 | 0.9936 |
| | CAR (Late | | | | | |
| | Timepoints) | | | | | |
| CRISPRi | GD2 CAR vs CD19 | COPS7B | 0.020136 | 0.792396 | 480 | 0.22539 |
| | CAR (Late | | | | | |
| | Timepoints) | | | | | |
| CRISPRi | GD2 CAR vs CD19 | IGFL4 | 0.021886 | 0.794536 | 508 | 0.54593 |
| | CAR (Late | | | | | |
| | Timepoints) | | | | | |
| CRISPRi | GD2 CAR vs CD19 | UBAP2L | 0.041563 | 0.868392 | 903 | 0.24222 |
| | CAR (Late | | | | | |
| | Timepoints) | | | | | |
| CRISPRi | GD2 CAR vs CD19 | NFKBIA | 0.12102 | 0.976748 | 2320 | −0.30086 |
| | CAR (Late | | | | | |
| | Timepoints) | | | | | |
| CRISPRi | GD2 CAR vs CD19 | KIAA1551 | 0.167 | 1 | 3136 | 0.29632 |
| | CAR (Late | | | | | |
| | Timepoints) | | | | | |
| CRISPRi | GD2 CAR vs CD19 | DCUN1D3 | 0.18177 | 1 | 3408 | −0.019604 |
| | CAR (Late | | | | | |
| | Timepoints) | | | | | |
| CRISPRi | GD2 CAR vs CD19 | CASP3 | 0.21645 | 1 | 4030 | −0.055236 |
| | CAR (Late | | | | | |
| | Timepoints) | | | | | |
| CRISPRi | GD2 CAR vs CD19 | CAND1 | 0.24663 | 1 | 4601 | −0.096495 |
| | CAR (Late | | | | | |
| | Timepoints) | | | | | |
| CRISPRi | GD2 CAR vs CD19 | SND1 | 0.29028 | 1 | 5348 | −0.17049 |
| | CAR (Late | | | | | |
| | Timepoints) | | | | | |
| CRISPRi | GD2 CAR vs CD19 | MADD | 0.30453 | 1 | 5583 | −0.30758 |
| | CAR (Late | | | | | |
| | Timepoints) | | | | | |
| CRISPRi | GD2 CAR vs CD19 | CFAP54 | 0.30534 | 1 | 5596 | −0.026544 |
| | CAR (Late | | | | | |
| | Timepoints) | | | | | |
| CRISPRi | GD2 CAR vs CD19 | KRTAP10-9 | 0.38288 | 1 | 7098 | −0.17569 |
| | CAR (Late | | | | | |
| | Timepoints) | | | | | |
| CRISPRi | GD2 CAR vs CD19 | ARIH2 | 0.45708 | 1 | 8467 | 0.090844 |
| | CAR (Late | | | | | |
| | Timepoints) | | | | | |
| CRISPRi | GD2 CAR vs CD19 | MYO5A | 0.46425 | 1 | 8619 | −0.90991 |
| | CAR (Late | | | | | |
| | Timepoints) | | | | | |
| CRISPRi | GD2 CAR vs CD19 | TSPEAR | 0.4671 | 1 | 8665 | 0.0055466 |
| | CAR (Late | | | | | |
| | Timepoints) | | | | | |
| CRISPRi | GD2 CAR vs CD19 | BORCS8 | 0.51205 | 1 | 9451 | −0.51234 |
| | CAR (Late | | | | | |
| | Timepoints) | | | | | |
| CRISPRi | GD2 CAR vs CD19 | CUL5 | 0.51923 | 1 | 9585 | −0.62277 |
| | CAR (Late | | | | | |
| | Timepoints) | | | | | |
| CRISPRi | GD2 CAR vs CD19 | PAK2 | 0.53914 | 1 | 9965 | −0.73379 |
| | CAR (Late | | | | | |
| | Timepoints) | | | | | |
| CRISPRi | GD2 CAR vs CD19 | UBE2L3 | 0.55091 | 1 | 10193 | −0.65651 |
| | CAR (Late | | | | | |
| | Timepoints) | | | | | |
| CRISPRi | GD2 CAR vs CD19 | RNASE9 | 0.6069 | 1 | 11234 | −0.3885 |
| | CAR (Late | | | | | |
| | Timepoints) | | | | | |
| CRISPRi | GD2 CAR vs CD19 | ATXN7L3 | 0.72668 | 1 | 13463 | −0.85109 |
| | CAR (Late | | | | | |
| | Timepoints) | | | | | |
| CRISPRi | GD2 CAR vs CD19 | WDFY1 | 0.72844 | 1 | 13494 | −0.37572 |
| | CAR (Late | | | | | |
| | Timepoints) | | | | | |
| CRISPRi | GD2 CAR vs CD19 | MED23 | 0.76257 | 1 | 14124 | −0.16467 |
| | CAR (Late | | | | | |
| | Timepoints) | | | | | |
| CRISPRi | GD2 CAR vs CD19 | UBE2F | 0.76945 | 1 | 14267 | −0.17933 |
| | CAR (Late | | | | | |
| | Timepoints) | | | | | |
| CRISPRi | GD2 CAR vs CD19 | GABARAPL1 | 0.79416 | 1 | 14796 | −1.2938 |
| | CAR (Late | | | | | |
| | Timepoints) | | | | | |
| CRISPRi | GD2 CAR vs CD19 | CPSF4L | 0.79703 | 1 | 14854 | −0.50705 |
| | CAR (Late | | | | | |
| | Timepoints) | | | | | |
| CRISPRi | GD2 CAR vs CD19 | TRIM56 | 0.81873 | 1 | 15294 | −0.4826 |
| | CAR (Late | | | | | |
| | Timepoints) | | | | | |
| CRISPRi | GD2 CAR vs CD19 | CDKN2A | 0.8497 | 1 | 15863 | −0.36384 |
| | CAR (Late | | | | | |
| | Timepoints) | | | | | |
| CRISPRi | GD2 CAR vs CD19 | DDA1 | 0.85954 | 1 | 16055 | −0.24472 |
| | CAR (Late | | | | | |
| | Timepoints) | | | | | |
| CRISPRi | GD2 CAR vs CD19 | CUTA | 0.88333 | 1 | 16558 | −0.6789 |
| | CAR (Late | | | | | |
| | Timepoints) | | | | | |
| CRISPRi | GD2 CAR vs CD19 | CISH | 0.88963 | 1 | 16652 | −0.61431 |
| | CAR (Late | | | | | |
| | Timepoints) | | | | | |
| CRISPRi | GD2 CAR vs CD19 | RPS6KA1 | 0.89691 | 1 | 16800 | −0.20772 |
| | CAR (Late | | | | | |
| | Timepoints) | | | | | |
| CRISPRi | GD2 CAR vs CD19 | ZMYND8 | 0.90296 | 1 | 16907 | −0.35354 |
| | CAR (Late | | | | | |
| | Timepoints) | | | | | |
| CRISPRi | GD2 CAR vs CD19 | KDM5C | 0.91459 | 1 | 17114 | −0.12989 |
| | CAR (Late | | | | | |
| | Timepoints) | | | | | |
| CRISPRi | GD2 CAR vs CD19 | PTEN | 0.93728 | 1 | 17552 | −1.3982 |
| | CAR (Late | | | | | |
| | Timepoints) | | | | | |
| CRISPRi | GD2 CAR vs CD19 | SBNO2 | 0.94019 | 1 | 17617 | −0.59561 |
| | CAR (Late | | | | | |
| | Timepoints) | | | | | |
| CRISPRi | GD2 CAR vs CD19 | CDK13 | 0.94234 | 1 | 17653 | −0.43648 |
| | CAR (Late | | | | | |
| | Timepoints) | | | | | |
| CRISPRi | GD2 CAR vs CD19 | TNIP1 | 0.95147 | 1 | 17832 | −1.2316 |
| | CAR (Late | | | | | |
| | Timepoints) | | | | | |
| CRISPRi | GD2 CAR vs CD19 | ATF7IP | 0.96582 | 1 | 18143 | −0.4039 |
| | CAR (Late | | | | | |
| | Timepoints) | | | | | |
| CRISPRi | GD2 CAR vs CD19 | RASA2 | 0.96819 | 1 | 18193 | −1.2981 |
| | CAR (Late | | | | | |
| | Timepoints) | | | | | |
| CRISPRi | GD2 CAR vs CD19 | MYB | 0.98898 | 1 | 18600 | −1.2852 |
| | CAR (Late | | | | | |
| | Timepoints) | | | | | |
| CRISPRi | GD2 CAR vs CD19 | ST8SIA5 | 0.99283 | 1 | 18710 | −0.55014 |
| | CAR (Late | | | | | |
| | Timepoints) | | | | | |
| CRISPRi | GD2 CAR vs CD19 | ZBTB21 | 0.9988 | 1 | 18886 | −1.1292 |
| | CAR (Late | | | | | |
| | Timepoints) | | | | | |
| CRISPRi | GD2 CAR vs CD19 | ARIH1 | 0.99984 | 1 | 18925 | −0.65672 |
| | CAR (Late | | | | | |
| | Timepoints) | | | | | |

### Example 2

[0280] Nine hits of interest from the CRISPRa screens were cloned as individual sgRNA vectors to perform arrayed in vitro cancer cell killing assays. The hits/sgRNAs improved cancer cell killing (including target-cell dependent), which demonstrates their usefulness in a T cell immunotherapy.

### Methods

[0281] CD8+ T cells were cultured in X-VIVO 15 (Lonza Bioscience, catalog no. 04-418Q) supplemented with 5% fetal calf serum (FCS), and 100 IU/ml of recombinant human IL-2 (Amerisource Bergen, catalog no. 10101641). Primary CD8+ T cells were activated using anti-human CD3/CD28 CTS Dynabeads (Fisher Scientific, catalog no. 40203D) at a 1:1 cell: bead ratio at 106 cells/ml. Eighteen hours after activation, CD8+ T cells from two human blood donors were transduced with concentrated dCas9-2A-BlasticidinResistance. Eight hours following dCas9 transduction, cells were split into two flasks and transduced with CAR lentiviruses, anti-CD19-28-zeta-2A-GFP, or high-affinity (HA) anti-GD2-28-zeta-2A-GFP. 16 hours following CAR transductions, cells were split into 20 wells and transduced with CRISPRa sgRNA lentiviruses targeting 9 hits from CRISPRa screens (2 sgRNAs per gene hit) plus two no-target control sgRNAs. Three days post-activation puromycin and blasticidin was added to select for dCas9 and sgRNA transduced cells. Cells were passaged every other day, adding IL-2 to 100U/ml at each passage.

[0282] For the NALM-6-GD2 killing assay, CRISPRa CD19 or GD2 CAR T cells for each sgRNA were mixed with NALM-6 lymphoma target cells engineered to express GD2 at effector:target ratios ranging from 1:1 to 1:16 with 100U/ml IL-2. Cells were passaged 48 hr later, replenishing IL-2. 6-days after starting the killing assay, cells were stained with anti-CD8a (T cell marker) and anti-CD22 (NALM6 marker) and cell counts were measured by flow cytometry to determine NALM6-GD2 abundance compared to a no T cell control.

[0283] For the 143B killing assay, 143B cells (GD2+ osteosarcoma cell line) engineered to express nuclear RFP were seeded in 384-well plates 24-hours before adding T cells. 12-days post activation CRISPRa GD2 CAR T cells for each sgRNA were added to wells at effector:target ratios ranging from 9:1 to 1:27. 143B cell counts were measured with RFP fluorescence over time using an Incucyte instrument. Data presented in FIGS. 22-27.

[0284] All patents and publications referenced or mentioned herein are indicative of the levels of skill of those skilled in the art to which the invention pertains, and each such referenced patent or publication is hereby specifically incorporated by reference to the same extent as if it had been incorporated by reference in its entirety individually or set forth herein in its entirety. Applicants reserve the right to physically incorporate into this specification any and all materials and information from any such cited patents or publications.

[0285] The specific methods and compositions described herein are representative of preferred embodiments and are exemplary and not intended as limitations on the scope of the invention. Other objects, aspects, and embodiments will occur to those skilled in the art upon consideration of this specification and are encompassed within the spirit of the invention as defined by the scope of the claims. It will be readily apparent to one skilled in the art that varying substitutions and modifications may be made to the invention disclosed herein without departing from the scope and spirit of the invention.

[0286] The invention illustratively described herein suitably may be practiced in the absence of any element or elements, or limitation or limitations, which is not specifically disclosed herein as essential. The methods and processes illustratively described herein suitably may be practiced in differing orders of steps, and the methods and processes are not necessarily restricted to the orders of steps indicated herein or in the claims.

[0287] As used herein and in the appended claims, the singular forms “a,” “an,” and “the” include plural reference unless the context clearly dictates otherwise. Thus, for example, a reference to “a nucleic acid” or “a protein” or “a cell” includes a plurality of such nucleic acids, proteins, or cells (for example, a solution or dried preparation of nucleic acids or expression cassettes, a solution of proteins, or a population of cells), and so forth. In this document, the term “or” is used to refer to a nonexclusive or, such that “A or B” includes “A but not B,” “B but not A,” and “A and B,” unless otherwise indicated.

[0288] Under no circumstances may the patent be interpreted to be limited to the specific examples or embodiments or methods specifically disclosed herein. Under no circumstances may the patent be interpreted to be limited by any statement made by any Examiner or any other official or employee of the Patent and Trademark Office unless such statement is specifically and without qualification or reservation expressly adopted in a responsive writing by Applicants.

[0289] The terms and expressions that have been employed are used as terms of description and not of limitation, and there is no intent in the use of such terms and expressions to exclude any equivalent of the features shown and described or portions thereof, but it is recognized that various modifications are possible within the scope of the invention as claimed. Thus, it will be understood that although the present invention has been specifically disclosed by preferred embodiments and optional features, modification and variation of the concepts herein disclosed may be resorted to by those skilled in the art, and that such modifications and variations are considered to be within the scope of this invention as defined by the appended claims and statements of the invention.

[0290] The invention has been described broadly and generically herein. Each of the narrower species and subgeneric groupings falling within the generic disclosure also form part of the invention. This includes the generic description of the invention with a proviso or negative limitation removing any subject matter from the genus, regardless of whether or not the excised material is specifically recited herein. In addition, where features or aspects of the invention are described in terms of Markush groups, those skilled in the art will recognize that the invention is also thereby described in terms of any individual member or subgroup of members of the Markush group.

1. A modified T cell, lymphoid cell or myeloid cell comprising a modification of one of more genes selected from BATF, CUL3, CLASRP, CDKL3, EOMES, FOXL2NB, FOXO6, FOXO4, FOSB, FOSL1, FOXL2, GLIS3, GL2, IRF4, IL2RA, INPP5D, IL2RB, ITPKA, ITPKB, HL10, IL9R, LIFR, LCK, LYN, NPM3, NQO1, PLEKHH3, PTEN, RFLNB, STAT5A, SHOC2, S100A13, TRAF3IP2, TMEM167B, TSR2, VAV1 or ZNF211, wherein the modification upregulates or increases expression of said gene in said modified T cell, lymphoid cell or myeloid cell as compared to a non-modified T cell, lymphoid cell or myeloid cell control.

2. The modified T cell, lymphoid cell or myeloid cell of claim 1, wherein the modification is one or more deletion, substitution or insertion into one or more of said genes.

3. The modified T cell, lymphoid cell or myeloid cell of claim 1, wherein the increased expression is by modification of one or more endogenous promoters of one or more of said genes.

4. The modified T cell, lymphoid cell or myeloid cell of claim 1, wherein the modified T cell, lymphoid cell or myeloid cell comprises one or more expression cassettes comprising a promoter operably linked to a nucleic acid segment comprising a coding region of any of said genes or a targeted knock-in of a cassette under the control of a selected endogenous promoter/gene regulatory element.

5. A modified T cell, lymphoid cell or myeloid cell comprising a modification of one of more of genes selected from CCNC, ELOB, ELOC, IGFL4, MED1, MED12 MED13, MN1, MED19, MEOX1, MOCS3, NQO2, PRDM14, SYCE1L, SYTL2, SRRD, SPIN1, UBF2E1, ARHGAP5, ARIH1, ARIH2, ATF7IP, ATF7IP2, ATXN7L3, BORCS8, CAND1, CASP3, CBFB, CDK13, CDKN2A, CFAP54, CISH, COPS7B, CPSF4L, CUL5, CUTA, DCUN1D3, DDA1, GABARAPL1, KDM5C, KIAA1551, KRTAP10-9, MADD, MAPKAP1, MED23, MED24, MYB, MYO5A, NFKBIA, PAK2, PDCL, PIK3R5, PTEN, RASA2, RNASE9, RNF7, RPS6KAI, SBNO2, SND1, ST8SIA5, TNIP1, TRIM56, TSPEAR, UBAP2L, UBE2F, UBE2L3, WDFY1, ZBTB21 or ZMYND8, wherein the modification downregulates or decreases expression of said gene in said modified T cell, lymphoid cell or myeloid cell as compared to a non-modified T cell, lymphoid cell or myeloid cell control.

6. The modified T cell, lymphoid cell or myeloid cell of claim 5, wherein the modified T cell, lymphoid cell or myeloid cell comprises an exogenous inhibitory nucleic acid (e.g., RNAi, shRNA, siRNA).

7. A method comprising ex vivo modification of any of the genes listed in Table 1 within at least one T cell, lymphoid cell or myeloid cell, or a combination thereof to generate at least one modified T cell, lymphoid cell, myeloid cell, or a mixture of modified T cells, lymphoid cells and myeloid cells.

8. The method of claim 7, wherein the modification is one or more deletion, substitution or insertion into one or more endogenous genomic sites of any of the genes listed in Table 1.

9. The method of claim 7, wherein the modification is reduction of expression or translation of any of the genes listed in Table 1.

10. The method of claim 9, wherein the reduction of expression or translation is by an inhibitory nucleic acid (e.g., RNAi, shRNA, siRNA).

11. The method of claim 7, wherein the modification is increased expression of any of the genes listed in Table 1.

12. The method of claim 11, wherein the increased expression is by modification of one or more promoters of any of the genes listed in Table 1.

13. The method of claim 7, wherein the modification is one or more CRISPR-mediated modifications or activations of any of the genes listed in Table 1.

14. The method of claim 7, wherein the modification is transformation of at least one T cell, lymphoid cell or myeloid cell, or a combination thereof, with one or more expression cassettes comprising a promoter operably linked to a nucleic acid segment comprising a coding region of any of the genes listed in Table 1 or a targeted knock-in of a cassette under the control of a selected endogenous promoter/gene regulatory element.

15. The method of claim 7, further comprising administering at least one modified T cell, lymphoid cell, myeloid cell, or a mixture of modified T cells, lymphoid cells and myeloid cells to a subject.

16. The method of claim 7, further comprising incubating the at least one modified T cell, lymphoid cell, myeloid cell, or a mixture of modified T cells, lymphoid cells and myeloid cells to form a population of modified cells.

17. The method of claim 16, further comprising administering the population of modified cells to a subject.

18. The method of claim 15, wherein the subject has a disease or condition.

19. The method of claim 18, wherein the disease or condition is an immune condition or cancer.

20.-24. (canceled)

25. A method to overcome T cell exhaustion comprising upregulating one or more genes selected from BATF, CUL3, CLASRP, CDKL3, EOMES, FOXL2NB, FOXO6, FOXO4, FOSB, FOSL1, FOXL2, GLIS3, GLI2, IRF4, IL2RA, INPP5D, IL2RB, ITPKA, ITPKB, IL10, IL9R, LIFR, LCK, LYN, NPM3, NQO1, PLEKHH3, PTEN, RFLNB, STAT5A, SHOC2, S100A13, TRAF3IP2, TMEM167B, TSR2, VAV1 or ZNF211 or downregulating one or more genes selected from CCNC, ELOB ELOC, IGFL4, MED1, MED12, MED13, MN1, MED19, MEOX1, MOCS3, NQO2, PRDM14, SYCE1L, SYTL2, SRRD, SPIN1, UBE2E1, ARHGAP5, ARIH1, ARIH2, ATF7JP, ATF7IP2, ATXN7L3, BORCS8, CAND1, CASP3, CBFB, CDK13, CDKN2A, CFAP54, CISH, COPS7B, CPSF4L, CUL5, CUTA, DCUN1D3, DDA1, GABARAPL1, KDM5C, KIAA1551, KRTAP10-9, MADD, MAPKAP1, MED23, MED24, MYB, MYO5A, NFKBIA, PAK2, PDCL, PIK3R5, PTEN, RASA2, RNASE9, RNF7, RPS6KA1, SBNO2, SND1, ST8SIA5, TNIP1, TRIM56, TSPEAR, UBAP2L, UBE2F, UBF2L3, WDFY1, ZBTB21 or ZMYND8 in a T cell, lymphoid cell, myeloid cell.

The application's sequence listing, which the Patent Office published only in electronic form, follows.

SEQUENCE LISTING (217 sequences)

SEQ ID NO: 1 - DNA, 913 bp, Homo sapiens
  source 1..913: mol_type = other DNA
aaagcgagcgacatgtccctttggggagcagtccctctgcaccccagagtgaggaggacgcaggggtcagaggtggctacagggcaggcagaggaggcacctgtagggggtggtgggctggtggcccaggagaagtcaggaagggagcccagctggtgacaagagagcccagaggtgcctggggctgagtgtgagagcccggaagatttcagccatgcctcacagctccgacagcagtgactccagcttcagccgctctcctccccctggcaaacaggactcatctgatgatgtgagaagagttcagaggagggagaaaaatcgtattgccgcccagaagagccgacagaggcagacacagaaggccgacaccctgcacctggagagcgaagacctggagaaacagaacgcggctctacgcaaggagatcaagcagctcacagaggaactgaagtacttcacgtcggtgctgaacagccacgagcccctgtgctcggtgctggccgccagcacgccctcgccccccgaggtggtgtacagcgcccacgcattccaccaacctcatgtcagctccccgcgcttccagccctgagcttccgatgcggggagagcagagcctcgggaggggcacacagactgtggcagagctgcgcccatcccgcagaggcccctgtccacctggagacccggagacagaggcctggacaaggagtgaacacgggaactgtcacgactggaagggcgtgaggcctcccagcagtgccgcagcgtttcgaggggcgtgtgctggaccccaccactgtgggttgcaggcccaatgcagaagagtattaagaaagatgctcaagtcccatggcacagagcaaggcgggcagggaacggttatttttctaaataaatgctttaaaagaaa

SEQ ID NO: 2 - protein, 125 aa, Homo sapiens
MPHSSDSSDSSFSRSPPPGKQDSSDDVRRVQRREKNRIAAQKSRQRQTQKADTLHLESEDLEKQNAALRKEIKQLTEELKYFTSVLNSHEPLCSVLAASTPSPPEVVYSAHAFHQPHVSSPRFQP

SEQ ID NO: 3 - DNA, 6756 bp, Homo sapiens
  source 1..6756: mol_type = other DNA
gaggacgacgttcggcctgcgcagtgagatgtttgtccgtcgccgccgccgccgccatcgcggaggagcgcgataaagggagccgagccggacgtgagggggaccccgcggagccgccgcgccagcgcagccccccagccgcatcggagtcgccagagtccgagccgccgccgccgccgccgccgcccccgccgccgccgcggctgcccaggggccggccagctccccagccctgcccgggggtcgcgccgccgccgcccccagcgtcgcccctagcctgcctgcccgccttaaatgtgacaccggcgtcgcggagcgcgacctgaagccgccgccggggaggggacgagcaccatgtcgaatctgagcaaaggcacgggcagccggaaggacaccaagatgcggatccgggcctttccgatgaccatggatgaaaaatatgtaaacagcatttgggaccttctgaaaaatgcaattcaagaaatccagcgtaagaataacagtggtcttagttttgaggagctctatagaaatgcatatacaatggttttgcataaacatggagaaaagctctacactggactaagagaagttgttaccgaacatctcataaataaggtgcgagaagatgtactaaattcattgaataacaactttcttcaaacgctaaatcaagcttggaatgatcatcaaacagctatggtgatgattagagacatactaatgtacatggaccgtgtgtatgtacaacaaaataatgtggagaacgtctacaatttgggattaattatttttcgagatcaagttgtacgttatgggtgtattagggatcatctacggcaaactctattggatatgattgcaagagagcggaaaggagaagtcgtagacagaggcgcaataagaaatgcttgccagatgttaatgattttaggtctcgaaggaagatcagtctatgaagaagattttgaggctccttttttggaaatgtctgcagaattttttcagatggaaagccagaaatttttagcagaaaatagtgcttcagtatatataaagaaagtagaagctagaattaatgaagaaatagaacgagtgatgcactgccttgacaaatcaacggaagaaccaattgtaaaggtggttgaaagggaactcatttccaagcacatgaagactatagtagaaatggagaattctgggctagtacatatgttgaaaaatggaaagacagaagaccttggttgcatgtacaagttatttagtcgtgtgccaaatggtttgaaaacaatgtgtgagtgtatgagttcctatttgagggagcaaggtaaagctcttgtttctgaagaaggagaaggaaagaatcctgttgactatatccagggcttattggatctgaagagtaggttcgatcgcttcctcctggaatcattcaacaatgaccgtctctttaaacaaactattgcgggtgactttgagtattttctcaacctcaactccaggtctcctgaatacctctcattatttattgatgataagctgaaaaagggagtcaaagggctaacagaacaagaagtagaaacaatattggataaagcaatggtcctttttaggtttatgcaagaaaaagatgtatttgaacgttattataaacaacacttggcaaggagacttctcacaaataaaagtgtttctgatgactctgaaaaaaacatgatatctaagttaaagactgaatgtggatgtcagttcacgtcaaaactggaaggaatgtttagggatatgagcatctcaaacacaacgatggatgaattcaggcaacatctacaggcaactggtgtatctttaggtggtgttgatcttacagtccgggtgctcacgacaggatattggcccactcagtcagccacaccaaagtgcaacatcccaccagcaccaagacatgcttttgagatattcagaaggttctacttagccaaacacagtggtcgacagctcacactccagcatcatatgggttctgcagatctcaatgccacattttatggaccagttaaaaaggaagatggatctgaagttggtgttggaggtgcacaagtaactggctctaatacacggaagcacatattgcaagtttccactttccagatgaccatattaatgctctttaataatagagaaaaatacacatttgaggaaattcagcaagagacagatatccctgaaagagagcttgttagagccctacagtccctcgcctgtggtaaaccaacacagcgggttcttacaaaagaacccaaatcaaaggaaatagaaaatggtcatatatttacagttaatgatcaattcacatccaaactacacagagtcaagattcaaacagttgctgccaaacaaggtgaatccgacccagagaggaaagaaacaaggcagaaagtagacgacgacagaaaacatgagatagaagctgctatagtgcggataatgaaatctagaaagaagatgcagcacaatgttctagtagcggaggtaactcagcagttgaaggcgcgattcttaccaagtccagttgttattaagaaacgtattgaaggacttattgagagagaatatttggcacgaacacctgaggatcgcaaagtatacacatatgtagcataaaatgcgttcagaaatttgatttattcttggactgtactcttcgcatggactgggaagttcttttaaatcattaaatattaagacgaccatctcttctattaaattacagtacatgttctagaccattgagatcaagcctttactccctttgagagtttccaacatcagttgattgagcttcaggctttacaacgtttatccctgtagagatcatctttacagttcctcgggaaaatgtgaatgtgctgcgttttgttttctttactgtatgaaaacaggaaaataaaagagaaatttagaaaatacagctcattacaataaaattgttggatttcatttccccaggtcttcagtgttgatgtaaatgtgttttgtagtgttgcttagcactttgcgcattgtgtaagttgggtaacaaaaatggcaaaagaaatgcagatttcccagttatcttgctctgaagacatttctttagctagtcttatttaattttaaaggtttgataaatatacaaagacccaagcatacaatttgagcatgctgtattctaccacttgcacttactcatcttctagccttatgaccaggaacctttgttttgggctcaagtacacatcctgatttggtttctccctgttgtaatttgagatttcccaaattaagtcttataatgattaggttttgttctgagttatttctagagaaagaaagtattttagtatgtgtaaattgtacaataatttttttgctgttgtactcactgctaatagtggattgtatagggtggtgtttttatttcatttattgtagacaaaaataatgaatttagtatacacatacccactaattcaagtatgtcagagcacaaagttggcagctggttatatttaattcagcccctctgaaaagcacatacagtctatactttgtttataaataccctaggtcctccctgcccctaaatatatattttggtgaagctgtggtgcactattaattttctgtttcaaaatgcaatctaaagatgcaataaatatgatgaccttgatagttttaatgaaatcttcaattcttgcagctgtgttttggaaagtgattaagcaatatttctcaaacctgatgattcttggatatttagctattgtcctccaaagagtcatcgtttcacgttttcaaacatgtgctttgtgctgaagattcttgtcagatatcctgtgcttccagagtatttttatcttcaattttatttaattttgtttcattttgttttcataagacaatgtttcagatatgtaatggggcaaaccactatagatttctgttggatagaaaaatgaaatgttactaataagtttaaattgacccttcgttgactatcagtactgttgatacatttattagaatgtatgtctcagaagatggtttctgtttaaatttatggtcaagttacaacaactgaattctaatatggattaaaaactccacataaatatttttccccatgcgtcttgggttataattttccttttagacttgcaaatatgcttttattgcaattttgtctccatctgtactgtagaattacaagccttgtgctctttatctctacattttccacttctacatgatgcaattaagatgccaatgaaaagtattgtgaacattattctcaggacacttttaccatacttgagtagtactaagtcaggtgtaacatggaaagctaagggtttcaccttctgattttgacataattggaaattttctataatggtaagatgtttataggaaagtaatggtagttcatgtttgagaatttttttattgctttcatttcccagttaaatgatatttaacacctgggaaaacaggacagctcagattgtcgagttagtaaacatgagcgatgtaaaaactttatttgaaatctcctaagtgagacattaaacattttagtgctagtttaagccattaaaagtaaagtttaagtttacgtcattgtctcaagtgtggctgtaaaaatcagatctagagtttagagacatacttgttaactttggagcacaggtttgatatttatgcttctaaatacattaaaacatttctgaattgcagttgaatggttggagattgctggcgatgtgatgctgcactgaaaaaactggtcacacaaaatgtttatatgtttgactgcataagtattattttaggtcataaaggttataacaaaatacatttaacattgctttctttttagcaagaggtcacagatgctattttttctcagtttttaatgctttaatttgaaagaaaaatgcatcctaaccattccatcctgttggtgcagagaaattttggtgatttattagaagacttttaaggagggtggatacatagtttttcaactgcaaaaatcatgtcatctcttcagtaactgttaaagtgtaattctctgccttcattatcaagtccaggacagtgtttattttgaatcgttaacattatttaaagactgaaaattcattgcaattagggaacgcacagcctcacaaaaagtggttgtgattgcaaggattctttatgtcagtgaacttaaaaagggaatgggggaagagatgcatgcctttctaaaggtatgctagagtcacctgtgtagcattgtaattatgtactatcaaacccccaagatgctgatgataggccttctctgtaagaatccttctcatagtgaagcactgttgatgttttgttcaccggatatgttgggtagcagaaaaggcctagaaccagttttaagattatgcctacatctctagaagactagtacactggcatcatcttaggtttctaaatattatttaattccttaatttggaaagcagttttaatgtttacagtttaagatactcattttcagtaactagtgttaaagatttttatctttgcctgtctactgtaacttaagactttcatagaataattttttatagagtatatggtatattgtgtcaatcttggaaggaaagctgttgcatatcaattgtaggtcatgtattttactatatgttgcatagtattttgcattctgtaaatacgaatgttaaaacatttcaggtcagcaaaattagaagtcatttctagtcctcaaagcagaaataattagaaatgttaacatttaagtgcttatcatatgccagatactattctgaatattttatgtatattcattcatttagttgtcatattggctttatgtgacataactgtcattataccagtgttgtccaaggttgctagcaggaaatggcagagccaggagttggacctaggtttaatcctatccatattccatgttacaaattgacatgattttccatattaaaaaattttcatttattttgtacctcattcacatgaatagtaatgtgacaaactaaagttaatacatgaagcattgcaatatggaattttgcacatttttgttagctttacattatttgctgataccaacttttggtaggaaggaaaacagggaaggtgattgctgctattctggaatgtgtccattgaaaagaaaataggcgctttgtctcctacaatcttagagaaagttttacatacttaagtgggtaccacagataggcatgtaccttaaattcaaatctacagttttacaaaatgttttcctttgtgtgcctttcctatgtcaaattagccagaaggaagaagagacgttaagaatggcagataaatttaacaggtaatgatacagagattggccattacgccagctctcaggagaaaaacaactaggatgtcttgaaacccgtgcatttaattttagaaatggcaaatttgtaagcgtgtcatttaagtaatttgatgctcagttttagggtctaagttgacctcgagtgagccatgcaaaaatagctttaaaattatacatgagcagctcaaagtaaacgtgtattttttagtaacaatgaaattgtcaaatttcaagattttaataacaggacagttcaactaataaactttattgcatacaagatttattgcaatgtgggaaaattaaaattctcagtctcagaa

SEQ ID NO: 4 - protein, 768 aa, Homo sapiens
MSNLSKGTGSRKDTKMRIRAFPMTMDEKYVNSIWDLLKNAIQEIQRKNNSGLSFEELYRNAYTMVLHKHGEKLYTGLREVVTEHLINKVREDVLNSLNNNFLQTLNQAWNDHQTAMVMIRDILMYMDRVYVQQNNVENVYNLGLIIFRDQVVRYGCIRDHLRQTLLDMIARERKGEVVDRGAIRNACQMLMILGLEGRSVYEEDFEAPFLEMSAEFFQMESQKFLAENSASVYIKKVEARINEEIERVMHCLDKSTEEPIVKVVERELISKHMKTIVEMENSGLVHMLKNGKTEDLGCMYKLFSRVPNGLKTMCECMSSYLREQGKALVSEEGEGKNPVDYIQGLLDLKSRFDRFLLESFNNDRLFKQTIAGDFEYFLNLNSRSPEYLSLFIDDKLKKGVKGLTEQEVETILDKAMVLFRFMQEKDVFERYYKQHLARRLLTNKSVSDDSEKNMISKLKTECGCQFTSKLEGMFRDMSISNTTMDEFRQHLQATGVSLGGVDLTVRVLTTGYWPTQSATPKCNIPPAPRHAFEIFRRFYLAKHSGRQLTLQHHMGSADLNATFYGPVKKEDGSEVGVGGAQVTGSNTRKHILQVSTFQMTILMLFNNREKYTFEEIQQETDIPERELVRALQSLACGKPTQRVLTKEPKSKEIENGHIFTVNDQFTSKLHRVKIQTVAAKQGESDPERKETRQKVDDDRKHEIEAAIVRIMKSRKKMQHNVLVAEVTQQLKARFLPSPVVIKKRIEGLIEREYLARTPEDRKVYTYVA

SEQ ID NO: 5 - DNA, 2229 bp, Homo sapiens
  source 1..2229: mol_type = other DNA
ctttcatttccgcttccggtgcgggccgcgcgcgagcgcagcggtgggaggcggcgaccagccggttgaggccccaggcttggcctcaccacaatgtggcacgaggctcggaagcatgagcggaagcttcgaggcatgatggtcgactacaagaagagggcggagcggagacgggagtattatgaaaagatcaagaaggacccagcccagttcctgcaggtacatggccgagcttgcaaggtgcacctggattctgcagtcgccctggccgctgagagccctgttaatatgatgccctggcagggggacaccaacaacatgattgaccgattcgatgtccgtgcccacctggaccacatccccgactacaccccccctctgctcaccaccatctccccagaacaggagtcggacgaacggaagtgtaactacgagcgctacagaggcctggtgcagaacgactttgccggcatctcagaggagcagtgcctgtaccagatctacattgatgagttgtacggaggcctccagagacccagcgaagatgagaagaagaagctggcagagaagaaggcttccatcggttatacctacgaggacagcacggtggccgaggtagagaaggcggcagaaaagccagaggaggaggagtcagcggccgaggaggagagcaactcggacgaagatgaggtcatccccgacatcgacgtggaggtggacgtggatgaattgaaccaggagcaggtggcagatctcaacaaacaggccacgacttatggcatggccgacggtgacttcgtcaggatgctccggaaagacaaggaggaggcagaggccatcaagcatgccaaggctcttgaggaggagaaggccatgtactcgggacgccgctctcgacgccagcggagagagtttcgggagaagcggctgaggggtcgcaagatcagcccacccagctatgcccgccgagacagccccacctatgacccctataagcggtcaccctcggagtccagctcagagtcccgctcccgctcccgctccccgaccccgggccgcgaggagaagatcacgttcatcaccagttttgggggcagcgatgaggaggcagccgcagccgctgctgccgcagcagcatcaggagtcaccacagggaagccccccgcacctccccagcctggcggccccgccccgggacgtaatgccagcgcccgccgccgctcctcctcctcctcctcctcctcttctgcctcgaggacctccagctcccgctccagctctcgctccagctcccgctctcgccgtggtgggggctactaccgttccggccgccacgcccgctcccggtcccgctcctggtcccgctcccgctcccgctcccggcgctattcccggtcccgtagccgtggccggcggcactcaggtgggggctcccgagacggacaccggtactcccgctcgcccgcccggcgtggtggttacgggccccggcgcagaagcaggagccgctcccactcaggggaccgctacaggcggggcggccggggcctcaggcaccacagcagtagccgcagccgcagcagctggtccctcagcccgtcccgcagtcgcagcctgactcgcagccgcagccatagccccagccccagccagagccgcagccgcagccgcagccgcagccagagcccctcgccatcacccgcaagagagaagctgaccaggccggccgcgtcccctgctgtgggcgagaagctgaaaaagaccgaacctgccgctggtaaagagacaggagctgccaaacccaagctgacgcctcaggagaagctgaaactgaggatgcagaaggcgctgaacaggcagttcaaggcggataagaaggcggcacaagaaaagatgatccagcaggagcatgagcggcaggagcgggaagacgagcttcgagccatggcccgcaagatccgcatgaaggagcgggaacgccgagagaaggagagagaagagtgggaacgccagtacagccggcagagccgctcaccctccccccgatacagtcgagaatacagctcttctcgaaggcgctcaaggtcccgatcccgaagcccccattaccgacattaggcagaagagtggggggtggggaggacaagggggtgggtaaggggctcaagctgtgatgctgctggttttatctctagtgaaataaagtcaaaagttatttaattcccgtca

SEQ ID NO: 6 - protein, 674 aa, Homo sapiens
MWHEARKHERKLRGMMVDYKKRAERRREYYEKIKKDPAQFLQVHGRACKVHLDSAVALAAESPVNMMPWQGDTNNMIDRFDVRAHLDHIPDYTPPLLTTISPEQESDERKCNYERYRGLVQNDFAGISEEQCLYQIYIDELYGGLQRPSEDEKKKLAEKKASIGYTYEDSTVAEVEKAAEKPEEEESAAEEESNSDEDEVIPDIDVEVDVDELNQEQVADLNKQATTYGMADGDFVRMLRKDKEEAEAIKHAKALEEEKAMYSGRRSRRQRREFREKRLRGRKISPPSYARRDSPTYDPYKRSPSESSSESRSRSRSPTPGREEKITFITSFGGSDEEAAAAAAAAAASGVTTGKPPAPPQPGGPAPGRNASARRRSSSSSSSSSASRTSSSRSSSRSSSRSRRGGGYYRSGRHARSRSRSWSRSRSRSRRYSRSRSRGRRHSGGGSRDGHRYSRSPARRGGYGPRRRSRSRSHSGDRYRRGGRGLRHHSSSRSRSSWSLSPSRSRSLTRSRSHSPSPSQSRSRSRSRSQSPSPSPAREKLTRPAASPAVGEKLKKTEPAAGKETGAAKPKLTPQEKLKLRMQKALNRQFKADKKAAQEKMIQQEHERQEREDELRAMARKIRMKERERREKEREEWERQYSRQSRSPSPRYSREYSSSRRRSRSRSRSPHYRH

SEQ ID NO: 7 - DNA, 3264 bp, Homo sapiens
  source 1..3264: mol_type = other DNA
agccagctgccgtctgcgctttgcaaagcatgcagttaggggagcagctcttggtgagctcagtgaacctgcctggcgcgcacttctacccgctggagagtgcgcgaggcggcagcggcgggagcgctggccacctccccagcgcggccccctctcctcagaagttggacttagacaaagcgtccaagaagttttccggcagtctctcctgcgaggcggtgagcggggagcccgcagccgccagcgcaggggcccccgcggccatgcttagtgacaccgacgccggggacgcatttgccagcgctgcggcagtggccaagccggggcccccggacggccgcaagggctccccctgcggggaggaggagctgccctccgccgctgcagccgccgccgccgccgccgccgcggctgcggccactgcgcgctactccatggacagcctgagctccgagcggtactacctccagtcccccggtcctcaggggtcggagctggctgcgccctgctcactcttcccgtaccaggcggcggctggggcgccccacggacctgtgtacccggctcctaacggggcgcgctacccctacggctccatgctgccccccggcggcttccccgcggctgtgtgcccacccgggagggcgcagttcggcccaggagccggtgcgggcagtggcgcgggcggtagcagcggcgggggcggcggcccgggcacctatcagtacagccagggggctccgctctacgggccgtaccctggagccgcagcggcgggatcttgcggaggactggggggcctgggggttccaggttctggcttccgtgcccacgtctacctgtgcaaccggcctctgtggctcaaattccaccgccaccaaactgagatgatcattacgaaacagggcaggcgcatgtttcctttcttgagcttcaacataaacggactcaatcccactgcccactacaatgtgttcgtagaggtggtgctggcggaccccaaccactggcgcttccaggggggcaaatgggtgacctgtggcaaagccgacaataacatgcagggcaacaaaatgtatgttcacccagagtctcctaatactggttcccactggatgagacaggagatttcattcgggaaattaaaactcaccaataacaaaggcgcaaataacaacaacacccagatgatagtcttacaatccttacacaaataccaaccccgactgcatattgttgaagttacagaggatggcgtggaggacttgaatgagccctcaaagacccagacttttaccttctcagaaacgcaattcattgcagtgactgcctaccaaaacaccgatattactcaactaaagattgatcataacccctttgcaaaaggcttcagagacaactatgattccatgtacaccgcttcagaaaatgacaggttaactccatctcccacggattctcctagatcccatcagattgtccctggaggtcggtacggcgttcaatccttcttcccggagccctttgtcaacactttacctcaagcccgctattataatggcgagagaaccgtgccacagaccaacggcctcctttcaccccaacagagcgaagaggtggccaaccctccccagcggtggcttgtcacgcctgtccagcaacctgggaccaacaaactagacatcagttcctatgaatctgaatatacttctagcacattgctcccatatggcattaaatccttgccccttcagacatcccatgccctggggtattacccagacccaacctttcctgcaatggcagggtggggaggtcgaggttcttaccagaggaagatggcagctggactaccatggacctccagaacaagccccactgtgttctctgaagatcagctctccaaggagaaagtgaaagaggaaattggctcttcttggatagagacacccccttccatcaaatctctagattccaatgattcaggagtatacaccagtgcttgtaagcgaaggcggctgtctcctagcaactccagtaatgaaaattcaccctccataaagtgtgaggacattaatgctgaagagtatagtaaagacacctcaaaaggcatgggagggtattatgctttttacacaactccctaaagagttattttaacctcaaaaattagctaactttttgcagatggacttggtggtgttttttgttgtcttctttgcctaggttgccaaaaagatgtttgccttccaccttgatgcatcctgttttgtgcaattctctaaaagaaggtgccaaagctttttgattgctgcaggtaactgaaacaaacctagcatttttaaaaaataagattaatggaagactttaaggtattttaaaattcgaagggtatccaaggttctgtatttatttattggggagacactaacccttcaaagaagcaggctgtgaacattgggtgcccagtgctatcagatgagttaaaacctttgattctcatttctatttgtaaattcttaagcaaatagaagccgagtgttaaggtgttttgcttctgaaagagggctgtgccttccgtttcagaaggagacattttgctgttacattctgccaggggcaaaagatactaggcccaggagtcaagaaaagcttttgtgaaagtgatagtttcacctgactttgattccttaacccccggcttttggaacaagccatgtttgccctagtccaggattgcctcacttgagacttgctaggcctctgctgtgtgctggggtggccagtgggactcaggagagagcaagctaaggagtcaccaaaaaaaaaaaaaaaaaaaagggagaatttaaaagtgtacagttgtgtgtttagatacactatagaataatgtggtatatattgtacaaatagtctacataggtgtctgggataatgtaaaactggtgctttggctttgtaaagaatttgcaaatcacttaacagctgcaggggcaaggggagagtttcatcatccccatgatatttgggaatattctgtttacttcttagatagttaagaatgtattcagctactatgtactaacttgaaccgtgtttaaggaaaactcctatttcatcctcttcttgcgccatcccctctccctaacttggtaatgtgaagaaactaaaacctgataccacagctcctataggcattttagagatcttggatttttatgtacagtcttagtcatttttaataaatgtggttcagtaagggaa

SEQ ID NO: 8 - protein, 705 aa, Homo sapiens
MQLGEQLLVSSVNLPGAHFYPLESARGGSGGSAGHLPSAAPSPQKLDLDKASKKFSGSLSCEAVSGEPAAASAGAPAAMLSDTDAGDAFASAAAVAKPGPPDGRKGSPCGEEELPSAAAAAAAAAAAAAATARYSMDSLSSERYYLQSPGPQGSELAAPCSLFPYQAAAGAPHGPVYPAPNGARYPYGSMLPPGGFPAAVCPPGRAQFGPGAGAGSGAGGSSGGGGGPGTYQYSQGAPLYGPYPGAAAAGSCGGLGGLGVPGSGFRAHVYLCNRPLWLKFHRHQTEMIITKQGRRMFPFLSFNINGLNPTAHYNVFVEVVLADPNHWRFQGGKWVTCGKADNNMQGNKMYVHPESPNTGSHWMRQEISFGKLKLTNNKGANNNNTQMIVLQSLHKYQPRLHIVEVTEDGVEDLNEPSKTQTFTFSETQFIAVTAYQNTDITQLKIDHNPFAKGFRDNYDSMYTASENDRLTPSPTDSPRSHQIVPGGRYGVQSFFPEPFVNTLPQARYYNGERTVPQTNGLLSPQQSEEVANPPQRWLVTPVQQPGTNKLDISSYESEYTSSTLLPYGIKSLPLQTSHALGYYPDPTFPAMAGWGGRGSYQRKMAAGLPWTSRTSPTVFSEDQLSKEKVKEEIGSSWIETPPSIKSLDSNDSGVYTSACKRRRLSPSNSSNENSPSIKCEDINAEEYSKDTSKGMGGYYAFYTTP

SEQ ID NO: 9 - protein, 175 aa, Homo sapiens
MTRTPVGSARTRPKPRKLGPQRGKALQASSRLSESPALVKKRMPDACTLGRAGIGLPKMCLHMAVRHSKAQKTGPGILQQRQKPPAPRASGGPALLGKRRGCSEAGSASLEPLSSSRAAAGCLNQVPLSPFLAGPRNTRRLPAPERERIELAATLCLEGWPLRCLASKGKLHCVY

SEQ ID NO: 10 - DNA, 4094 bp, Homo sapiens
  source 1..4094: mol_type = other DNA
gagttcatctccaagtcactttttgtaaacgccccgcacagcctggaccggcctgcccccgcccagcgagcctcaggggcccagccgacagccaggctcacgcgcccttgaaatctgccggtactcgctctgcgggctgggctgggagatgacgaggaccccggtggggtctgcccgcacccggccaaagcccaggaagctcgggccccagcgaggaaaggcgctccaagcctcctcgcggctttcagaatccccagccctggtgaagaagaggatgcctgatgcgtgcaccctgggaagggctggaatcggtctccccaagatgtgccttcacatggctgtccggcattcgaaggctcagaaaacagggccgggaatcctgcaacagcggcagaagccgcccgcgcctcgggcttccggcggcccagctctactagggaagcgtcgcggctgctctgaggcaggcagcgcttcgctagaaccactcagctcgtcccgcgccgccgccggctgcctgaaccaggttccgctgtcccctttcctagcgggaccccgaaacacccggcggcttcccgctcctgagcgggagagaatagagcttgctgcaaccctctgcttggagggatggcctctgcggtgcttggctagcaaagggaagcttcactgtgtctattagtacatccccatacactccacgcctcaacaactgtcagcactcactccctcccggcccctcacagggccctttgcacccacacctcagggactcggtgtccctccactcaggtcacgttactccatccacttctctctccttctccctctgtcaactccaaatcccctctagttctccctcccctcctacttctctcacactcaccagctacacgtactaattcagattttgcacatgttggtggaaaacatgtcaagccaatgtgcagaccctaaggcttttcacacgctgctcactttcgcatctcacggtgcagaaggaccaatgggctccaggtttacaagcctgactccgagaagcctgttgattctctgatgtccttggcctgtgattcgggtgactgggctgccacctgggtgttttcatgatgggactgccgcacagaccacagagaagctcaggtactgagcacgttccagatacactttaacatgcacaggccactcacacaggctttatctctgtctcgaaactctgctgagtttgctgctcagaccaacaaggtgcagcagcagacacccacatagcaccaggtctgaagccagtgggtattagtctgcctggttgggattagcaaagtcagttactcacatatgtgcttgggagagaataggggagtggagagagagagagagatattgaggaagaggaaagagaagcgacctcctactctgggaagaactcacacatgagagctgtttcctgttgttaagtgtctcactgagctcccctctttctcccccaggaagggcttgagaggcagtagaccagagctctgggctcctctttaccttgctgatgttggggtatgagtcctccaacaccattttgtcccaaggagtatgtgccccatcgtcaatcaggcagaatgcagggcagttgtcggcctttttcatggtggaggccaactgggaaaaaggcagaagggtctgggtcctgggccaagtgaggccctcttccctccaaagacccgtgggatgctctcagaggcggattctagggtggtgggagctgctgacaagtttcctctgatatccctcatgacatctatggcccaaagccattttgttcagctctgaacagtgagtgccttgccagtaggcctcaggcttgctggggaacatgatgtgttcttaaaagttgccttgttgcctttctccacacccagactgtaagcgctgatgggcagagactctgccctccacttctcactcagtgctccccaccaggatgggcttaatgccttttaatagaattagaaaatggttctgctggacagaattgggaaatgccactttccttataatgaagttataatgaagttagaatttccaagaaagggactgtagctgaggaaaagcggtttgatcattgacagccagctcaggatctgagagttctttgccatttggggttattatagctgcatggccatggtgctgaaccttaggcaagggcaaggacacctccctagttcccagtcatggtgaggacctgtctgaaacattcaaactagactttactggaaacagagaagtctctgcattcagggcagctggcttgcaaggtaaggcctgcagtctccacccgcacgctaacccatgaggggatgccagagagagcccttcccccttggtcctcattcctggctcaattttctcccacaaagcgggcactttctaaagatgataggcaactgccatggaggaaggcagttttagatgcctagctggcacaaagtccagaggaagggagggagaagggctgagttttgtattactgttctacctttggagattttcctcatgccaagatagggtgtgtgtgtgtgtgtgtgtgtatgtgtgtgtgtatgtgtgcactataactttatgaaacactttttttttttttgagacagggtctcactctgttgcccaagctggagtgcagtggtgcaatcttggcttaccgcagtctccacctcccaggctcaagtgatcctcccatctcagcctcagcctcccaagtagctgggactatgggtgtgagccaacacactcagctaattttttttttttttttttggtatttttggtagagacagggttttaccatgtgggcccaactggtcttgagctcctgagctcagggtgatttgcctgcttcaacttcccaaagtgttgggattacaggtgtgagccaccatgcccagtcagttttttattttttatttaaacagttttgggggaacaggtggtttttgcttacatggataagttctttaatggtaatttctgagattttggtgcacttgtcacccgagcattgtacacggtacccagtgtgtaatcttttatccctcatccccctcctacgcttccccccccgagtccccattatataattctttttttcttctttttgagacagagtctcactctgttgcccaggctggagtgcagtggcatgaacttggcttactgcagcctcctgagttcaagtgattctcctgcctgaacctcctgtgtagctgggactacaggcatgcaccaccatgcccagctaatttttgtattttttgtagagatggggtttcaccatgttggccaggctagtcttgaactcctaacctcaagtgatctgcctattttggcctcccaaagtgttgggattacaggcgtgcgccactgcgcctggtccattatgtcattcttatgcctttgcatcttcatagcttagctcccacttataaatgaaaacacaggatatttggttttccatacttgagttacttcacttagtataatggtctccagctccatccaggttgctgtgaatgccattattttgttcctttttatggctgagtagtattccatggtgtatatatatcacattttctttatccactcattggttgatgggcatttagccttgttccatatttttgtatgcagtataacttacagatggtaaacaatatacagcttgatgtattctgacatgtaatgcagtatgtaaccaccacctggatcaagatatggagcatttctggcacttcagaaggttccttcatatctttttccaatcaatattgcctcaaaagggaaaccatatttggatttctatcaccataaataacctttgcctgccttgagcctcgtataaatggagcatatagcatgtatgcctttatgtctagttttttctgtgcaacatatttttaatattcactggtcttgttgcatgtgtcagacatttatttctttttattgctgtgtaatattctagtatttgcttatccatccatatgttgagggacatttgtttccagtttttggatatcataaataaagctgctgtgcacattgttgta

SEQ ID NO: 11 - protein, 559 aa, Homo sapiens
MAAKLRAHQVDVDPDFAPQSRPRSCTWPLPQPDLAGDEDGALGAGVAEGAEDCGPERRATAPAMAPAPPLGAEVGPLRKAKSSRRNAWGNLSYADLITKAIESAPDKRLTLSQIYDWMVRYVPYFKDKGDSNSSAGWKNSIRHNLSLHTRFIRVQNEGTGKSSWWMLNPEGGKTGKTPRRRAVSMDNGAKFLRIKGKASKKKQLQAPERSPDDSSPSAPAPGPVPAAAKWAASPASHASDDYEAWADFRGGGRPLLGEAAELEDDEALEALAPSSPLMYPSPASALSPALGSRCPGELPRLAELGGPLGLHGGGGAGLPEGLLDGAQDAYGPRARAGTPAYFGGCKGGAYGGGGGFGPPAMGALRRLPMQTIQENKQASFVPAAAPFRPGALPALLPPPPPAPRPGPVLGAPGELALAGAAAAYPGKGAAPYAPPAPSRSALAHPISLMTLPGEAGAAGLAPSGHAAAFGGPPGGLLLDALPGPYAAAAAGPLGAAPDRFPADLDLDMFSGSLECDVESIILNDFMDSDEMDFNFDSALPPPPPGLAGAPPPNQSWVPG

SEQ ID NO: 12 - DNA, 3086 bp, Homo sapiens
  source 1..3086: mol_type = other DNA
gaggtgcagccggcgctgagcgcggcaggcgcgggagctggcgctggagccggagcggcggcggcggcagcattcaccgggcggcggcggcgcgggctccggcaccggctcgggctccggcatggtgcaatccggcctcgtcccgggagagcagggcccgtgcgcagggccggcgcccggggagcggcggcagcggcggtggcggtggtggctgcaggcgcaggcaggcggcaggtgctagaagcggggctgggcgaggtgtgtgcccgctgggctcccgggccgccgccccctcactgcccaggtctttccctcccttcgtgctccccagcgcgtccagccccctgcctccgcgcctcggcccatggcgccccgcggctgagacagcgccgccagggacccctcccgcgggcctccccggggcgtgcagatcccggagccgcccgcccaccctccgcgaagcctccctcccctcctcgcccgagccgggcgggaccatggctgcgaagctgcgagcgcatcaggtggacgtggacccggacttcgcgccgcagagccggccgcgctcgtgtacctggcccctgccgcagcctgacttggccggcgacgaggacggagcgctgggcgcaggggtggccgagggcgccgaggactgcgggccggagcgccgggctacggccccggcgatggccccagcgccgcccctgggcgcggaggtcggaccgctgcggaaagcgaagagctctcggcggaacgcgtgggggaacctgtcctacgccgacctcatcaccaaagccatcgagagcgccccggacaagcggctcacgctctcgcagatctacgactggatggtccgttacgtgccctacttcaaggataaaggcgacagcaacagctcggccggctggaagaactccatccggcacaacctgtcgctgcacacccgtttcatccgcgtgcagaacgagggcaccggcaagagttcgtggtggatgctgaaccccgagggcggaaagacagggaagaccccgcggcgcagggccgtgtccatggacaacggggccaagttcctgcgcatcaagggcaaggcgagcaagaagaagcagctgcaggcgcccgagcgaagcccggacgacagctccccgagtgcgcccgccccggggccggtgcctgccgcagccaagtgggccgccagccccgcctcgcacgccagcgacgactacgaggcttgggccgacttccgcggcggcgggagacccctgctcggggaggcggccgagctggaggacgacgaggccctggaggccctggcgccatcatcgccgctcatgtacccaagccccgccagcgcgctgtcgccggcgctgggctcgcgctgtccgggtgagctgccccgcctggccgagctgggaggcccgctgggcctgcacggcggcggcggcgcggggctgcccgagggcctgctggacggcgcgcaggacgcgtacgggccgcgggcccgcgccgggacgcccgcctacttcggcggctgcaagggcggcgcctacggcgggggcgggggcttcgggccgccggcgatgggcgctctgcgccgtctgcccatgcagaccatccaggagaacaagcaggccagcttcgtgccggccgcggcgcccttccgccctggggcgctgcccgcgctgctgccgccgccgccgcccgcgcccaggcccggcccggtgctgggtgcgccgggggagctggcgctggcgggcgcagccgccgcctaccccggcaaaggggcggccccgtacgcgccgcccgcgccctcgcgcagtgccttagcccaccccatcagccttatgacgctgcccggcgaggcgggcgccgcgggcctggcaccgtcgggccacgccgccgccttcgggggcccgcccggcggcctcctgctggacgctctgccggggccctacgctgccgccgccgccgggccgctgggcgccgcgcccgaccgcttcccggccgacctggacctcgacatgttcagcgggagcctcgagtgcgacgtggagtccatcatcctcaacgacttcatggacagcgacgaaatggacttcaacttcgattcggccctgcctccaccgccgccgggcctggccggggccccgccccccaaccagagctgggtgccgggctgagggccgcctcccgcctccgggcgccccgtcccgtccccagggggcctctgtcttcccatcctgattcccgggtccctgcccccgactctagctccccaggaggcggccccagcccagctagggacccctctcggaggccggccgccggggaaggggagggaggggccggggcaccccactgctcctgcccacactcctgagatccacccccttctcctgggcaggaagcctgggagaggaggctgaattccaggctggctgggagtagggaggagcggggtgggccgcctggtgtggacggtggtcggggaagccaactaggagatgggccagggagcgtttacaaatcttcagtttcatttgcggaggcctagccgtgaccccgcgcccaccccaaacacggatctgattcccacttgacacactttcccactggtcttagtctcacccacccgaagccagcaaccctctgcggaaaactcacacctacctatatccatccaccctgagcagccctccacccccaaatcgccctccgacgaccgccacccccacagttcagtctccccctcccatccctgccggccctcgcttctcccctcccccgtcggagtcagtccctctcttcaaccgcccccaccccctagtactggtctcagcttctccagcgggcctcagccccgtccacccccaaccccgacgcccctttctccgcgccagttctggcccttctcccatatttataagtgtccggccgggacgggcggtgggcgcggcgtccccggcgcgtatcgtaggcagtgtaccgtggccgtgccgtcagagtgtgcgtgtgcgtgtgtgccgtgtcgaggctgtgtagagtgcattgtacagcatattttcatgaataaaattgttttaaatatt

SEQ ID NO: 13 - protein, 505 aa, Homo sapiens
MDPGNENSATEAAAIIDLDPDFEPQSRPRSCTWPLPRPEIANQPSEPPEVEPDLGEKVHTEGRSEPILLPSRLPEPAGGPQPGILGAVTGPRKGGSRRNAWGNQSYAELISQAIESAPEKRLTLAQIYEWMVRTVPYFKDKGDSNSSAGWKNSIRHNLSLHSKFIKVHNEATGKSSWWMLNPEGGKSGKAPRRRAASMDSSSKLLRGRSKAPKKKPSVLPAPPEGATPTSPVGHFAKWSGSPCSRNREEADMWTTFRPRSSSNASSVSTRLSPLRPESEVLAEEIPASVSSYAGGVPPTLNEGLELLDGLNLTSSHSLLSRSGLSGFSLQHPGVTGPLHTYSSSLFSPAEGPLSAGEGCFSSSQALEALLTSDTPPPPADVLMTQVDPILSQAPTLLLLGGLPSSSKLATGVGLCPKPLEAPGPSSLVPTLSMIAPPPVMASAPIPKALGTPVLTPPTEAASQDRMPQDLDLDMYMENLECDMDNIISDLMDEGEGLDFNFEPDP

SEQ ID NO: 14 - DNA, 3644 bp, Homo sapiens
  source 1..3644: mol_type = other DNA
gcagatggctgccccggcgagtggtaaacagagacgtcaggagggggctgctgcttggagcaaaacaaaagggaaacccggggggcggggggtggggggggttgataggggaatcggtgcgggaataagggaggccgcagccgcggggacccggaccctagtaagagtggcgagaagggaagaggcgggggaagggggagtcaggggaggggcaagtgacgcgggggagcggggcgtgggggagggcagcaatccgggtggaggaaatttgggaggagtgtccggggggcagcaacttaaaagggggagggaactgcggctaaggagacgttcggtgatgggagcgcaatatatgaggggatacagtgcctcaggtttaaaagagcaggaagctgagtgagaggttgcagaaaaagtgtcttcgctcggcagaggttacaggtggcatctcagaaagagctttgaggctacaggctgtagtcgggaaggggatcggagaactgtgtgaagggacagcttagggactagcgtcctgggactagggggaagttcgcgactttctgaagactggcaggaatgtgcctcctggccctcgatgcttcccccctgaggggaggcatcgtgagggactgtggcaggcttcactgaacgctgagccggggaggtccaactccacgtatggatccggggaatgagaattcagccacagaggctgccgcgatcatagacctagatcccgacttcgaaccccagagccgtccccgctcctgcacctggccccttccccgaccagagatcgctaaccagccgtccgagccgcccgaggtggagccagatctgggggaaaaggtacacacggaggggcgctcagagccgatcctgttgccctctcggctcccagagccggccgggggcccccagcccggaatcctgggggctgtaacaggtcctcggaagggaggctcccgccggaatgcctggggaaatcagtcatatgcagaactcatcagccaggccattgaaagcgccccggagaagcgactgacacttgcccagatctacgagtggatggtccgtactgtaccctacttcaaggacaagggtgacagcaacagctcagcaggatggaagaactcgatccgccacaacctgtccctgcacagcaagttcatcaaggttcacaacgaggccaccggcaaaagctcttggtggatgctgaaccctgagggaggcaagagcggcaaagccccccgccgccgggccgcctccatggatagcagcagcaagctgctccggggccgcagtaaagcccccaagaagaaaccatctgtgctgccagctccacccgaaggtgccactccaacgagccctgtcggccactttgccaagtggtcaggcagcccttgctctcgaaaccgtgaagaagccgatatgtggaccaccttccgtccacgaagcagttcaaatgccagcagtgtcagcacccggctgtcccccttgaggccagagtctgaggtgctggcggaggaaataccagcttcagtcagcagttatgcagggggtgtccctcccaccctcaatgaaggtctagagctgttagatgggctcaatctcacctcttcccattccctgctatctcggagtggtctctctggcttctctttgcagcatcctggggttaccggccccttacacacctacagcagctcccttttcagcccagcagaggggcccctgtcagcaggagaagggtgcttctccagctcccaggctctggaggccctgctcacctctgatacgccaccaccccctgctgacgtcctcatgacccaggtagatcccattctgtcccaggctccgactcttctgttgctgggggggcttccttcctccagtaagctggccacgggcgtcggcctgtgtcccaagcccctagaggctccaggccccagcagtctggttcccaccctttctatgatagcaccacctccagtcatggcaagtgcccccatccccaaggctctggggactcctgtgctcacaccccctactgaagctgcaagccaagacagaatgcctcaggatctagatcttgatatgtatatggagaacctggagtgtgacatggataacatcatcagtgacctcatggatgagggcgagggactggacttcaactttgagccagatccctgagtcatgcctggaagctttgtcccctgcttcagatgtggagccaggcgtgttcatatctactctttacccttgagccctccccaggaatttgggaccctgctttagagctagggtggggtctggtcacacacaggtgttgaagaaattataaagataaagctgccccatctggggacgatatggggagggagatgggaggggaaaggggagagggtttttctcactgtgccaattagggggtaaggccccctctcaggagccatcatcggctttccccattcctacccacttaggctttgtagcaagatgagcaatgctgttggaaatgtgaagtcaccagtggccttacccctgcctttgggagcaggatttttttgtagagagtcttatctgagctgagccaggctagctggagcctgggatttctatgcagtggccccttaggccagtgatgtgcggtgggtgggctgtttaggggatctggaagggccaaggtctgagcactggagtggctcgccaggccaaatcacccttagaaggctgcagataacagaaaggctttttataaacttttaaagaaatataaacacaaatatagagattttttaaccatggcagggtgctagtggtgggcagaatgcttttttttctttctgaaggctttgtgatagtgacatgatacaaacactacagacaataaatattaggagacacagggaagtggggagaggtggggagtaatagtaaacacagggaagagctcccctacggaccaggtatagagaaaggtctatgcagaaataggttagagtttccctaacaaaaaagctaacccaggtcccctcattccttcaacttgtgcctgggagtgtgtggtgttagggtgcagccacactcttctatgacccagcatgggttagtgctatggtgggagagtacattgaaggcctggaattagcttggggccagggaagggactgggaggggagagaagagaaggagggaaggatttaggatggtaaagttaggtacagagacctccctgttcaaggcccctgacagctgtccctgcccttcttccccttccctgactgcaggggttatgtggaagtgtgtgtggcagcaggcagcggggaggggaggaacagggaagggggagctggggagcttggctgagggtctgggaaatgagcagggatggggggggatgtggatcaggtttactagcacctgccagggaggccatctggggctccttctccaccccagcccccaaagcagcccttcccccagtgccctttgcatcgtcccctcccccacccctgctgtgggttcccatcatttcctgtgtcagcgcctggcctacccagattgtatcatgtgctagattggagtggggaagtgtgtcaaatcaataaatgaataaattcaataaatgcctataacca

SEQ ID NO: 15 - protein, 338 aa, Homo sapiens
MFQAFPGDYDSGSRCSSSPSAESQYLSSVDSFGSPPTAAASQECAGLGEMPGSFVPTVTAITTSQDLQWLVQPTLISSMAQSQGQPLASQPPVVDPYDMPGTSYSTPGMSGYSSGGASGSGGPSTSGTTSGPGPARPARARPRRPREETLTPEEEEKRRVRRERNKLAAAKCRNRRRELTDRLQAETDQLEEEKAELESEIAELQKEKERLEFVLVAHKPGCKIPYEEGPGPGPLAEVRDLPGSAPAKEDGFSWLLPPPPPPPLPFQTSQDAPPNLTASLFTHSEVQVLGDPFPVVNPSYTSSFVLTCPEVSAFAGAQRTSGSDQPSDPLNSPSLLAL

SEQ ID NO: 16 - DNA, 3775 bp, Homo sapiens
  source 1..3775: mol_type = other DNA
attcataagactcagagctacggccacggcagggacacgcggaaccaagacttggaaacttgattgttgtggttcttcttgggggttatgaaatttcattaatctttttttttccggggagaaagtttttggaaagattcttccagatatttcttcattttcttttggaggaccgacttactttttttggtcttctttattactcccctccccccgtgggacccgccggacgcgtggaggagaccgtagctgaagctgattctgtacagcgggacagcgctttctgcccctgggggagcaacccctccctcgcccctgggtcctacggagcctgcactttcaagaggtacagcggcatcctgtgggggcctgggcaccgcaggaagactgcacagaaactttgccattgttggaacgggacgttgctccttccccgagcttccccggacagcgtactttgaggactcgctcagctcaccggggactcccacggctcaccccggacttgcaccttacttccccaacccggccatagccttggcttcccggcgacctcagcgtggtcacaggggcccccctgtgcccagggaaatgtttcaggctttccccggagactacgactccggctcccggtgcagctcctcaccctctgccgagtctcaatatctgtcttcggtggactccttcggcagtccacccaccgccgccgcctcccaggagtgcgccggtctcggggaaatgcccggttccttcgtgcccacggtcaccgcgatcacaaccagccaggacctccagtggcttgtgcaacccaccctcatctcttccatggcccagtcccaggggcagccactggcctcccagcccccggtcgtcgacccctacgacatgccgggaaccagctactccacaccaggcatgagtggctacagcagtggcggagcgagtggcagtggtgggccttccaccagcggaactaccagtgggcctgggcctgcccgcccagcccgagcccggcctaggagaccccgagaggagacgctcaccccagaggaagaggagaagcgaagggtgcgccgggaacgaaataaactagcagcagctaaatgcaggaaccggcggagggagctgaccgaccgactccaggcggagacagatcagttggaggaagaaaaagcagagctggagtcggagatcgccgagctccaaaaggagaaggaacgtctggagtttgtgctggtggcccacaaaccgggctgcaagatcccctacgaagaggggcccgggccgggcccgctggcggaggtgagagatttgccgggctcagcaccggctaaggaagatggcttcagctggctgctgccgcccccgccaccaccgcccctgcccttccagaccagccaagacgcaccccccaacctgacggcttctctctttacacacagtgaagttcaagtcctcggcgaccccttccccgttgttaacccttcgtacacttcttcgtttgtcctcacctgcccggaggtctccgcgttcgccggcgcccaacgcaccagcggcagtgaccagccttccgatcccctgaactcgccctccctcctcgctctgtgaactctttagacacacaaaacaaacaaacacatgggggagagagacttggaagaggaggaggaggaggagaaggaggagagagaggggaagagacaaagtgggtgtgtggcctccctggctcctccgtctgaccctctgcggccactgcgccactgccatcggacaggaggattccttgtgttttgtcctgcctcttgtttctgtgccccggcgaggccggagagctggtgactttggggacagggggtgggaaggggatggacacccccagctgactgttggctctctgacgtcaacccaagctctggggatgggtggggaggggggcgggtgacgcccaccttcgggcagtcctgtgtgaggattaagggacgggggtgggaggtaggctgtggggtgggctggagtcctctccagagaggctcaacaaggaaaaatgccactccctacccaatgtctcccacacccaccctttttttggggtgcctaggttggtttcccctgcactcccgaccttagcttattgatcccacatttccatggtgtgagatcctctttactctgggcagaagtgagccccccccttaaagggaattcgatgcccccctagaataatctcatccccccacccgacttcttttgaaatgtgaacgtccttccttgactgtctagccactccctcccagaaaaactggctctgattggaatttctggcctcctaaggctccccaccccgaaatcagcccccagccttgtttctgatgacagtgttatcccaagaccctgccccctgccagccgaccctcctggccttcctcgttgggccgctctgatttcaggcagcaggggctgctgtgatgccgtcctgctggagtgatttatactgtgaaatgagttggccagattgtggggtgcagctgggtggggcagcacacctctggggggataatgtccccactcccgaaagcctttcctcggtctcccttccgtccatcccccttcttcctcccctcaacagtgagttagactcaagggggtgacagaaccgagaagggggtgacagtcctccatccacgtggcctctctctctctcctcaggaccctcagccctggcctttttctttaaggtcccccgaccaatccccagcctaggacgccaacttctcccaccccttggcccctcacatcctctccaggaagggagtgaggggctgtgacatttttccggagaagatttcagagctgaggctttggtacccccaaacccccaatatttttggactggcagactcaaggggctggaatctcatgattccatgcccgagtccgcccatccctgaccatggttttggctctcccaccccgccgttccctgcgcttcatctcatgaggatttctttatgaggcaaatttatattttttaatatcggggggtggaccacgccgccctccatccgtgctgcatgaaaaacattccacgtgccccttgtcgcgcgtctcccatcctgatcccagacccattccttagctatttatccctttcctggtttccgaaaggcaattatatctattatgtataagtaaatatattatatatggatgtgtgtgtgtgcgtgcgcgtgagtgtgtgagcgcttctgcagcctcggcctaggtcacgttggccctcaaagcgagccgttgaattggaaactgcttctagaaactctggctcagcctgtctcgggctgacccttttctgatcgtctcggcccctctgattgttcccgatggtctctctccctctgtcttttctcctccgcctgtgtccatctgaccgttttcacttgtctcctttctgactgtccctgccaatgctccagctgtcgtctgactctgggttcgttggggacatgagattttattttttgtgagtgagactgagggatcgtagatttttacaatctgtatctttgacaattctgggtgcgagtgtgagagtgtgagcagggcttgctcctgccaaccacaattcaatgaatccccgacccccctaccccatgctgtacttgtggttctctttttgtattttgcatctgaccccggggggctgggacagattggcaatgggccgtcccctctccccttggttctgcactgttgccaataaaaagctcttaaaaacgca

SEQ ID NO: 17 - protein, 271 aa, Homo sapiens
MFRDFGEPGPSSGNGGGYGGPAQPPAAAQAAQQKFHLVPSINTMSGSQELQWMVQPHFLGPSSYPRPLTYPQYSPPQPRPGVIRALGPPPGVRRRPCEQISPEEEERRRVRRERNKLAAAKCRNRRKELTDFLQAETDKLEDEKSGLQREIEELQKQKERLELVLEAHRPICKIPEGAKEGDTGSTSGTSSPPAPCRPVPCISLSPGPVLEPEALHTPTLMTTPSLTPFTPSLVFTYPSTPEPCASAHRKSSSSSGDPSSDPLGSPTLLAL

SEQ ID NO: 18 - DNA, 1702 bp, Homo sapiens
  source 1..1702: mol_type = other DNA
gagtcagaacccagcagccgtgtaccccgcagagccgccagccccgggcatgttccgagacttcggggaacccggcccgagctccgggaacggcggcgggtacggcggccccgcgcagcccccggccgcagcgcaggcagcccagcagaagttccacctggtgccaagcatcaacaccatgagtggcagtcaggagctgcagtggatggtacagcctcatttcctggggcccagcagttaccccaggcctctgacctaccctcagtacagccccccacaaccccggccaggagtcatccgggccctggggccgcctccaggggtacgtcgaaggccttgtgaacagatcagcccggaggaagaggagcgccgccgagtaaggcgcgagcggaacaagctggctgcggccaagtgcaggaaccggaggaaggaactgaccgacttcctgcaggcggagactgacaaactggaagatgagaaatctgggctgcagcgagagattgaggagctgcagaagcagaaggagcgcctagagctggtgctggaagcccaccgacccatctgcaaaatcccggaaggagccaaggagggggacacaggcagtaccagtggcaccagcagcccaccagccccctgccgccctgtaccttgtatctccctttccccagggcctgtgcttgaacctgaggcactgcacacccccacactcatgaccacaccctccctaactcctttcacccccagcctggtcttcacctaccccagcactcctgagccttgtgcctcagctcatcgcaagagtagcagcagcagcggagacccatcctctgacccccttggctctccaaccctcctcgctttgtgaggcgcctgagccctactccctgcagatgccaccctagccaatgtctcctccccttcccccaccggtccagctggcctggacagtatcccacatccaactccagcaacttcttctccatccctctaatgagactgaccatattgtgcttcacagtagagccagcttggggccaccaaagctgcccactgtttctcttgagctggcctctctagcacaatttgcactaaatcagagacaaaatatttcccatttgtgccagaggaatcctggcagcccagagactttgtagatccttagaggtcctctggagccctaaccccttccagatcactgccacactctccatcaccctcttcctgtgatccacccaaccctatctcctgacagaaggtgccactttacccacctagaacactaactcaccagccccactgccagcagcagcaggtgattggaccaggccattctgccgccccctcctgaaccgcacagctcaggaggcgcccttggcttctgtgatgagctgatctgcggatctcagctttgagaagccttcagctccagggaatccaagcctccacagcgagggcagctgctatttattttcctaaagagagtatttttatacaaacctaccaaaatggaataaaaggcttgaagctgtggcctgagtgcctcactggacccagaggccaatgggagagtatttggagccctaggtcccagccttagctctacagactcactgcatgaccttggacaaattctttgatatttttggactttgtcttatctgacaagtggggctacatccgctcggcctcatctccgggactg

SEQ ID NO: 19 - protein, 376 aa, Homo sapiens
MMASYPEPEDAAGALLAPETGRTVKEPEGPPPSPGKGGGGGGGTAPEKPDPAQKPPYSYVALIAMAIRESAEKRLTLSGIYQYIIAKFPFYEKNKKGWQNSIRHNLSLNECFIKVPREGGGERKGNYWTLDPACEDMFEKGNYRRRRRMKRPFRPPPAHFQPGKGLFGAGGAAGGCGVAGAGADGYGYLAPPKYLQSGFLNNSWPLPQPPSPMPYASCQMAAAAAAAAAAAAAAGPGSPGAAAVVKGLAGPAASYGPYTRVQSMALPPGVVNSYNGLGGPPAAPPPPPHPHPHPHAHHLHAAAAPPPAPPHHGAAAPPPGQLSPASPATAAPPAPAPTSAPGLQFACARQPELAMMHCSYWDHDSKTGALHSRLDL

SEQ ID NO: 20 - DNA, 2914 bp, Homo sapiens
  source 1..2914: mol_type = other DNA
agaacagagcgaggctcctggcgcactagggactccaggaggcagctccgccagagacgcgggtcgtgcttcgggaaaccggggggcggggggaggggaagagcgcagaaaagaaaacccaccaaggcggggactggcctgagcggggaggggcggcgaggccggagcccctctctgttgggcggactccccatggccagaggctgagctccactcccgccggccgctccctaggggaaggggaaggagaggggagagcagcgacaggcctccagcaagcaagcgcgggcggcatccgcagtctccagaagtttgagacttggccgtaagcggactcgtgcgccccaactctttgccgcgccagcgcctggagcggagagcagaggcggcccggccgcggcgcgccggctttgtcatgatggccagctaccccgagcccgaggacgcggcgggggccctgctggccccagagaccggtcgcacagtcaaggagccagaagggccgccgccgagcccaggcaagggcggtgggggtggcggcgggacagccccggagaagccggacccggcgcagaagcccccgtactcgtacgtggcgctcatcgccatggcgatccgcgagagcgcggagaagaggctcacgctgtccggcatctaccagtacatcatcgcgaagttcccgttctacgagaagaataagaagggctggcaaaatagcatccgccacaacctcagcctcaacgagtgcttcatcaaggtgccgcgcgagggcggcggcgagcgcaagggcaactactggacgctggacccggcctgcgaagacatgttcgagaagggcaactaccggcgccgccgccgcatgaagaggcccttccggccgccgcccgcgcacttccagcccggcaaggggctcttcggggccggaggcgccgcaggcgggtgcggcgtggcgggcgccggggccgacggctacggctacctggcgccccccaagtacctgcagtctggcttcctcaacaactcgtggccgctaccgcagcctccctcacccatgccctatgcctcctgccagatggcggcagccgcagcggctgcagcagctgcggctgcagccgcgggccccggtagccctggcgcggccgctgtggtcaaggggctggcgggcccggccgcctcgtacgggccgtacacacgcgtgcagagcatggcgctgccccccggcgtagtgaactcgtacaatggcctgggaggcccgccggccgcacccccgcctccgccgcacccccacccgcatccgcacgcacaccatctgcacgcggccgccgcaccgccgcctgccccaccgcaccacggggccgccgcgccgccgccgggccagctcagccctgccagcccagccaccgccgcgcccccggcgcccgcgcccaccagtgcgccgggcctgcagttcgcttgtgcccggcagcccgagctcgccatgatgcattgctcttactgggaccacgacagcaagaccggcgcgctgcattcgcgcctcgatctctgagagcccaccgcatgccggtgcagacggatgcgaggatgcagggacgcgcgacgccggccccggtcgcagccgacgacgccgccgccagcctgacctcacaccctctgggcccgcctctggagccagcgcccagggtccctctgtgctttttcgctttcctaagctcctgtcgctcctctttgtcccctcagtttatgtcctcctgtgctcacctccctgacctctgtgaccttgcactcccctggcctgaagctgcctctctgcgcgctttctactgggctcgtctctttccggagccccagcgtctcctgcccaaattcaccgcggaaagggcccggggcggaggtgcgaccgggcgtcggcagcgcagacctcttggccttctctcacaggtcggtgcgctcgctctccgcgttccccgcccgactgccgtgcagtccatggctagacgcgccggacaggactgatggcgggaccgcgctgcccgagaaagggacggaccaatacgtgtgtttgctccgcgaaccctcttgaagctgttcagaagccgcttgccgcggggcccactaggcggggcgggggttgggacccagcgggagccggggcagcctggctccacggcctgtactcggtttacaccgcgggcgggcgcggagggaggctgcgtttcctccgctatcagtcccgtcgcttcgggcacctccgggccccggcggctggctaatgttttgtttgaaagatcggtggaactttttaagagagtatttaaaaaaaaaaaaaggaaaaaaaattcaccgggcaaccggggaagtattgtggccttggagtttgctaaatccaaatatgaaaatcaaaagctttagtattcctcatcttctcttctggaagatttgcgttagagtttttgttgggccttcaaaaagctgtgttcagagttaggagaatatatccaataaaagatggtttcgtctaccaattggggaagtttcaccctctccctatctgaagaaaaaaatcaaaaacaaatgtccccggatctttcgatgcaagtcctggaggcagggagatcactgcctgcctggcccacgctgctgggacggctcgtcctccctgctttttgtttttcaaacctcctgcttctcccaccttgggaaggagaaatgtgaaacccggcagcggccgacctaggcggtcttgtggcccggagccggcccggcccgaaaaccatagacctggttgtactgtagcttgttgtttgggggaccaaattttctagagagaactagagcacttttgttgtgtttttttgttttgtttttgttttttgccttgtcgattcccgaataaattttgtgttccttcttttaa

SEQ ID NO: 21 - protein, 775 aa, Homo sapiens
MMVQRLGLISPPASQVSTACNQISPSLQRAMNAANLNIPPSDTRSLISRESLASTTLSLTESQSASSMKQEWSQGYRALPSLSNHGSQNGLDLGDLLSLPPGTSMSSNSVSNSLPSYLFGTESSHSPYPSPRHSSTRSHSARSKKRALSLSPLSDGIGIDFNTIIRTSPTSLVAYINGSRASPANLSPQPEVYGHFLGVRGSCIPQPRPVPGSQKGVLVAPGGLALPAYGEDGALEHERMQQLEHGGLQPGLVNHMVVQHGLPGPDSQSAGLFKTERLEEFPGSTVDLPPAPPLPPLPPPPGPPPPYHAHAHLHHPELGPHAQQLALPQATLDDDGEMDGIGGKHCCRWIDCSALYDQQEELVRHIEKVHIDQRKGEDFTCFWAGCPRRYKPFNARYKLLIHMRVHSGEKPNKCTFEGCEKAFSRLENLKIHLRSHTGEKPYLCQHPGCQKAFSNSSDRAKHQRTHLDTKPYACQIPGCTKRYTDPSSLRKHVKAHSSKEQQARKKLRSSTELHPDLLTDCLTVQSLQPATSPRDAAAEGTVGRSPGPGPDLYSAPIFSSNYSSRSGTAAGAVPPPHPVSHPSPGHNVQGSPHNPSSQLPPLTAVDAGAERFAPSAPSPHHISPRRVPAPSSILQRTQPPYTQQPSGSHLKSYQPETNSSFQPNGIHVHGFYGQLQKFCPPHYPDSQRIVPPVSSCSVVPSFEDCLVPTSMGQASFDVFHRAFSTHSGITVYDLPSSSSSLFGESLRSGAEDATFLQISTVDRCPSQLSSVYTEG

SEQ ID NO: 22 - DNA, 3133 bp, Homo sapiens
  source 1..3133: mol_type = other DNA
atcctttatggttgaagggtgttggaggaagcagagttttcatcagctgctgaagtggcaactaatagaggtttgaatggccgtagaaaaatattgtgttacttgtttgttgtctaggggctcttggctttgggcctcagtgcaagtccattggaaaaggcagctgcaacaatctagtggtcaccagcagtcccatgatggttcagcgactgggactcatttcacctccagcaagccaggtctctacagcatgcaaccagatcagtcctagcttacagagggcaatgaatgcagccaacctgaatatacctccttcagataccaggtcccttatttcgcgtgagtctttggcgtccacgaccttgagtctgacggaaagtcagtcggcctcaagcatgaagcaggagtggtcccagggctacagggccctcccttcgctctccaaccacggctctcagaatggccttgatctaggggatctccttagccttcctcccgggacatccatgtccagcaatagtgtctctaactcattaccatcctacctttttggcacggaaagtagccactctccttaccctagtcctcggcactcatccaccaggtcccactcggcccgctccaagaagagagcgctgtccttgtccccgctgtccgatggcatcgggatagatttcaataccatcatccgcacgtcgcccacgtccttggtggcctacatcaacgggtcgagggcttcgccggccaacctgtccccgcagccggaggtctacgggcatttcctgggcgtgcgcggcagctgcattccccagccgcgcccggtgcccggcagccagaagggcgtgctggtggcccctggaggcctggcgctgccggcctacggcgaggacggggccctggagcacgagcgcatgcaacagctggagcacggcggcctgcagccaggcctggtcaaccacatggtggtgcagcatggcctgccgggccccgacagccagccggccggcctgttcaagaccgaacgcctggaggagttcccgggcagcaccgtagacctaccccccgcgcctccgctccctcctctgccgccgccccaaggccccccacccccttaccatgcccatgcgcaccttcaccacccggagctcgggccccacgcccagcagctggccttgccccaggccaccctggacgacgacggggagatggacggcatcgggggcaagcattgctaccgctggatcgactgcagcgccctgtacgaccagcaggaggagctcgtgcggcacatcgagaaggtccacatcgaccagcgcaaaggggaggacttcacttgcttctgggccggttgccctcgaagatacaagcccttcaacgcccgctataaactgctgatccacatgagagtccactctggggagaagcccaacaagtgtacgtttgaaggttgcgagaaggccttttcaaggcttgaaaatctcaagatccacttgcggagccacacaggcgagaagccgtatttgtgccagcatccgggttgtcagaaggccttcagtaactccagtgaccgcgccaaacaccagcggacgcatctggacaccaaaccttatgcttgtcaaattccaggatgtaccaaacgctacacagacccaagttccctaagaaagcatgtgaaggcacattcttccaaagagcaacaagcaaggaaaaagttgcggtccagcacagagctccatccagacctgctcacagattgcctcaccgtgcagtccctgcagccggccacttcccctagagatgctgctgctgaagggaccgtgggacgctcccctggacccgggcctgacctctattcagctcccattttctccagcaattattcaagccgaagtggaacagctgctggggccgtaccacccccacatcctgtcagtcacccttctccaggacataatgtacaggggagccctcacaacccctcctcccagttacctccactcacagctgtggacgcaggagctgagaggtttgcaccttctgctccatctcctcaccacatcagcccccggagagttccagctccttcttcaatactgcaaagaacacagcctccctatacccagcagccatcaggttcacacctgaagtcctatcagccagaaacaaactcttcttttcaaccaaatggtatccatgtccatggattttatgggcagctgcagaagttctgtcccccacactaccccgattcccagagaattgtgccgcctgtcagctcctgcagtgtggtgccttcgtttgaggactgcctagtccctacatccatgggccaggccagttttgatgttttccacagagccttctcgactcactcgggcattacagtgtatgatttaccttcaagttcctcgagcctctttggggagtctctccgcagcggggctgaagatgctaccttcttgcagatcagcaccgtggaccgctgtcctagccagctctcctctgtctacaccgaaggctaaaagctctcttggccactcctgcacacccaggaccttgatgttgcttgccaccttttgttttcgtactctcacagactgcttgaggaaggatgtcagcccaatcagcgggccctgcagagttactgatgttctttcagaaggcaggactgaatggcagagctagctttgcaggaatcattacagttgctcctttttctctctggttttcctggactatgtgaccaggaggactgtcttttcaaagggaatttagagcctcactctcctggatacctgttacttcctggctgtcaacccttaaaggaccccagtgaaatgatgtgcatatgaaaatgtagtttggggatgactctacctgaaaactccaaacagggaaaaagacctcaattacgagaggcatagtgacctgcctcacctaatcctcacccttgctgctcctgatgcaaaaccaggcacaacaagggaaatccatgtccaaagcatagtgtggtctcaactcttagaaactccctgggtttcccttttctcttagccacatgctaaccagttgcttctcagtgtttctcttcaatagaaaaataaggttttatatgccaaaaaaaaaaaaaaaa

SEQ ID NO: 23 - protein, 1586 aa, Homo sapiens
METSASATASEKQEAKSGILEAAGFPDPGKKASPLVVAAAAAAAVAAQGVPQHLLPPFHAPLPIDMRHQEGRYHYEPHSVHGVHGPPALSGSPVISDISLIRLSPHPAGPGESPFNAPHPYVNPHMEHYLRSVHSSPTLSMISAARGLSPADVAQEHLKERGLFGLPAPGTTPSDYYHQMTLVAGHPAPYGDLLMQSGGAASAPHLHDYLNPVDVSRFSSPRVTPRLSRKRALSISPLSDASLDLQRMIRTSPNSLVAYINNSRSSSAASGSYGHLSAGALSPAFTFPHPINPVAYQQILSQQRGLGSAFGHTPPLIQPSPTFLAQQPMALTSINATPTQLSSSSNCLSDTNQNKQSSESAVSSTVNPVAIHKRSKVKTEPEGLRPASPLALTQGQVSGHGSCGCALPLSQEQLADLKEDLDRDDCKQEAEVVIYETNCHWEDCTKEYDTQEQLVHHINNEHIHGEKKEFVCRWQACTREQKPFKAQYMLVVHMRRHTGEKPHKCTFEGCSKAYSRLENLKTHLRSHTGEKPYVCEHEGCNKAFSNASDRAKHQNRTHSNEKPYICKIPGCTKRYTDPSSLRKHVKTVHGPDAHVTKKQRNDVHLRTPLLKENGDSEAGTEPGGPESTEASSTSQAVEDCLHVRAIKTESSGLCQSSPGAQSSCSSEPSPLGSAPNNDSGVEMPGTGPGSLGDLTALDDTPPGADTSALAAPSAGGLQLRKHMTTMHRFEQLKKEKLKSLKDSCSWAGPTPHTRNTKLPPLPGSGSILENFSGSGGGGPAGLLPNPRLSELSASEVTMLSQLQERRDSSTSTVSSAYTVSRRSSGISPYFSSRRSSEASPLGAGRPHNASSADSYDPISTDASRRSSEASQCSGGSGLLNLTPAQQYSLRAKYAAATGGPPPTPLPGLERMSLRTRLALLDAPERTLPAGCPRPLGPRRGSDGPTYGHGHAGAAPAFPHEAPGGGARRASDPVRRPDALSLPRVQRFHSTHNVNPGPLPPCADRRGLRLQSHPSTDGGLARGAYSPRPPSISENVAMEAVAAGVDGAGPEADLGLPEDDLVLPDDVVQYIKAHASGALDEGTGQVYPTESTGFSDNPRLPSPGLHGQRRMVAADSNVGPSAPMLGGCQLGFGAPSSLNKNNMPVQWNEVSSGTVDALASQVKPPPFPQGNLAVVQQKPAFGQYPGYSPQGLQASPGGLDSTQPHLQPRSGAPSQGIPRVNYMQQLRQPVAGSQCPGMTTTMSPHACYGQVHPQLSPSTISGALNQFPQSCSNMPAKPGHLGHPQQTEVAPDPTTMGNRHRELGVPDSALAGVPPPHPVQSYPQQSHHLAASMSQEGYHQVPSLLPARQPGFMEPQTGPMGVATAGFGLVQPRPPLEPSPTGRHRGVRAVQQQLAYARATGHAMAAMPSSQETAEAVPKGAMGNMGSVPPQPPPQDAGGAPDHSMLYYYGQIHMYEQDGGLENLGSCQVMRSQPPQPQACQDSIQPQPLPSPGVNQVSSTVDSQLLEAPQIDFDAIMDDGDHSSLFSGALSPSLLHSLSQNSSRLTTPRNSLTLPSIPAGISNMAVGDMSSMLTSLAEESKFLNMMT

SEQ ID NO: 24 - DNA, 7187 bp, Homo sapiens
  source 1..7187: mol_type = other DNA
gctgatggattgcagaagtgccggcgcttgccagccgaggcagcacggctccgcggactttttttcaaactcccatcaatgagacttcgaggaggagcgggcggcggcggcggctgcgactgcgaacgcggaggaaggccaggagccgcaggaggagccggaggaaagagcttgggccgcgcggcgcgccgcagcctcggggagccgcctgctcgccggcggtaggggctgcgcggcgcccgcccgcctctcggtcccctctcttgcctggcccgccccgccccggctggctggagccccggcacaaggcagccagccgagggtcgccgcgccagccaaggtgggatgggggcccacagccaccgcccggcgcccgagaggccacctgcgtgctagaggcaaacttttgtctctctcggattgccacccaggacgatgagcggctgagatggagacgtctgcctcagccactgcctccgagaagcaagaagccaaaagtgggatcctggaggccgctggcttccccgacccgggtaaaaaggcctctcctttggtggtggctgcagcggcagcagcagcggtagctgcccaaggagtgccgcagcatctcttgccaccattccatgcgcccctaccgattgacatgcgacaccaggaaggaaggtaccattacgagcctcattctgtccacggtgtgcacgggccccctgccctcagcggcagccctgtcatctctgacatctccttgatccggctttccccgcacccggctggccctggggagtcccccttcaacgccccccacccgtacgtgaacccccacatggagcactacctccgttctgtgcacagcagccccacgctctccatgatctctgcagccaggggcctcagccccgctgatgtggcccaggagcaccttaaggagaggggactgtttggccttcctgctccaggcaccaccccctcagactattaccaccagatgaccctcgtggcaggccaccccgcgccctacggggacctgctgatgcagagcgggggcgctgccagcgcaccccatctccacgactacctcaaccccgtggacgtgtcccgtttctccagcccgcgggtgacgccccgcctgagccgcaagcgggcgctgtccatctccccactctcagacgccagcctggacctgcagcggatgatccgcacctcacccaactcgctagtggcctacatcaacaactcccgaagcagctcggcggccagcggttcctacgggcatctgtcagcgggtgccctcagcccagccttcaccttcccccaccccatcaaccccgtggcctaccagcagattctgagccagcagaggggtctggggtcagcctttggacacacaccacccctgatccagccctcacccaccttcctggcccagcagcccatggccctcacctccatcaatgccacgcccacccagctcagcagcagcagcaactgtctgagtgacaccaaccagaacaagcagagcagtgagtcggccgtcagcagcaccgtcaaccctgtcgccattcacaagcgcagcaaggtcaagaccgagcctgagggcctgcggccggcctcccctctggcgctgacgcagggccaggtgtctggacacggctcatgtgggtgtgcccttcccctctcccaggagcagctggctgacctcaaggaagatctggacagggatgactgtaagcaggaggctgaggtggtcatctatgagaccaactgccactgggaagactgcaccaaggagtacgacacccaggagcagctggtgcatcacatcaacaacgagcacatccacggggagaagaaggagtttgtgtgccgctggcaggcctgcacgcgggagcagaagcccttcaaggcgcagtacatgctggtggtgcacatgcggcgacacacgggcgagaagccccacaagtgcacgttcgagggctgctcgaaggcctactcccgcctggagaacctgaagacacacctgcggtcccacaccggggagaagccatatgtgtgtgagcacgagggctgcaacaaagccttctccaacgcctcggaccgcgccaagcaccagaatcgcacccactccaacgagaaaccctacatctgcaagatcccaggctgcaccaagagatacacagaccccagctctctccggaagcatgtgaaaacggtccacggcccagatgcccacgtcaccaagaagcagcgcaatgacgtgcacctccgcacaccgctgctcaaagagaatggggacagtgaggccggcacggagcctggcggcccagagagcaccgaggccagcagcaccagccaggccgtggaggactgcctgcacgtcagagccatcaagaccgagagctccgggctgtgtcagtccagccccggggcccagtcgtcctgcagcagcgagccctctcctctgggcagtgcccccaacaatgacagtggcgtggagatgccggggacggggcccgggagcctgggagacctgacggcactggatgacacacccccaggggccgacacctcagccctggctgccccctccgctggtggcctccagctgcgcaaacacatgaccaccatgcaccggttcgagcagctcaagaaggagaagctcaagtcactcaaggattcctgctcatgggccgggccgactccacacacgcggaacaccaagctgcctcccctcccgggaagtggctccatcctggaaaacttcagtggcagtgggggcggcgggcccgcggggctgctgccgaacccgcggctgtcggagctgtccgcgagcgaggtgaccatgctgagccagctgcaggagcgccgcgacagctccaccagcacggtcagctcggcctacaccgtgagccgccgctcctccggcatctccccctacttctccagccgccgctccagcgaggcctcgcccctgggcgccggccgcccgcacaacgcgagctccgctgactcctacgaccccatctccacggacgcgtcgcggcgctcgagcgaggccagccagtgcagcggcggctccgggctgctcaacctcacgccggcgcagcagtacagcctgcgggccaagtacgcggcagccactggcggccccccgcccactccgctgccgggcctggagcgcatgagcctgcggaccaggctggcgctgctggacgcgcccgagcgcacgctgcccgccggctgcccacgcccactggggccgcggcgtggcagcgacgggccgacctatggccacggccacgcgggggctgcgcccgccttcccccacgaggctccaggcggcggagccaggcgggccagcgaccctgtgcggcggcccgatgccctgtccctgccgcgggtgcagcgcttccacagcacccacaacgtgaaccccggcccgctgccgccctgtgccgacaggcgaggcctccgcctgcagagccacccgagcaccgacggcggcctggcccgcggcgcctactcgccccggccgcctagcatcagcgagaacgtggcgatggaggccgtggcggcaggagtggacggcgcggggcccgaggccgacctggggctgccggaggacgacctggtgcttccagacgacgtggtgcagtacatcaaggcgcacgccagtggcgctctggacgagggcaccgggcaggtgtatcccacggaaagcactggcttctctgacaaccccagactacccagcccggggctgcacggccagcgcaggatggtggctgcggactccaacgtgggcccctccgcccctatgctgggaggatgccagttaggctttggggcgccctccagcctgaacaaaaataacatgcctgtgcagtggaatgaggtgagctccggcaccgtagacgccctggccagccaggtgaagcctccaccctttcctcagggcaacctggcggtggtgcagcagaagcctgcctttggccagtacccgggctacagtccgcaaggcctacaggctagccctgggggcctggacagcacgcagccacacctgcagccccgcagcggagccccctcccagggcatccccagggtaaactacatgcagcagctgcgacagccagtggcaggcagccagtgtcctggcatgactaccactatgagcccccatgcctgctatggccaagtccacccccagctgagccccagcaccatcagtggggccctcaaccagttcccccaatcctgcagcaacatgccagccaagccagggcatctggggcaccctcagcagacagaagtggcacctgaccccaccacgatgggcaatcgccacagggaacttggggtccccgattcagccctggctggagtgccaccacctcacccagtccagagctacccacagcagagccatcacctggcagcctccatgagccaggagggctaccaccaggtccccagccttctgcctgcccgccagcctggcttcatggagccccaaacaggcccgatgggggtggctacagcaggctttggcctagtgcagccccggcctcccctcgagcccagccccactggccgccaccgtggggtacgtgctgtgcagcagcagctggcctacgccagggccacaggccatgccatggctgccatgccgtccagtcaggaaacagcagaggctgtgcccaagggagcgatgggcaacatggggtcggtgcctccccagccgcctccgcaggacgcaggtggggccccggaccacagcatgctctactactacggccagatccacatgtacgaacaggatggaggcctggagaacctcgggagctgccaggtcatgcggtcccagccaccacagccacaggcctgtcaggacagcatccagccccagcccttgccctcaccaggggtcaaccaggtgtccagcactgtggactcccagctcctggaggccccccagattgacttcgatgccatcatggatgatggcgatcactcgagtttgttctcgggtgctctgagccccagcctcctccacagcctctcccagaactcctcccgcctcaccaccccccgaaactccttgaccctgccctccatccccgcaggcatcagcaacatggctgtcggggacatgagctccatgctcaccagcctcgccgaggagagcaagttcctgaacatgatgacctagaggcccgagcgcctggtgctgagtgcacccggaggggtcatcgctgcccagagcctggggattccagctgtcttgtctttttccaaaaaagtgttaaataggcttgaggggttgttgcgcaatggccgcttcagatgacagatgttgtaagagaaggtttatgggcatcctctctggtcttttggattattcctcagaacaatgaaaaaagtctccataggacaggaaggaatgcaaaactcatttacacagtgctttccagcctttggtgcttacaggaccgcgctgttccggcttcttcacggctgacattcggctaacgagggattactttggccaaaacctttcaaaggatatgcagaaagatggtagggagcatttgggtttgaatctgaatgctatactggatactctgctccggaaagatgagctttttattctactacttggaaggaaaaggaattcctggtccacctgaattcctctatgaagcctaactcttgaggtctctaacataccttgtcatagaggaaaagcacagattatacctggatgattcaggagcacattctgattccaggtttggtagagctggctcttctactccgtaaagccgagtctgggactggcagcccatccaagtgtatatgaatgaataaagcatccaagtatatatgaatgaataaagtatgtaagtatcaccagaaaaaggaaagaaaaaatgtactccttggggcaagcccagaagctgccctggcctctccagaccgtgtttacagtgtttgcatgtagaatgtagcccttcctgaaaagaagacttgtttctaaatacctcggggctgctggagccgctgtgggttagggatggactgaggcctcgaggagtgagggtgcacccggggcccagcctcaggctgccctagggatctctcagtaggaagaggaagttgcgtgtttacccaatcctgtttctccaatgcaacgtccacccactttaccaccaaaaactccagggcctgacggcagcccggtcccccagcactcaccagcagcccagtgttctccaccaagccacagtgtgcatgcctggtatcctccggattcccttccttctgcccgctgagtcactgggcagagaatgatgacatgtgtaggtggtgtggttgggggtggaaaggggaaggggttgatcctcaggactctgagggagcatcgttgaattttcctgttcagtgtgaccaagacccacctggaaatggaatttggaactggcttcaggagacatcattcctgaacacactgtagggtgaattggtgcatcttccccaccatacacacacacacacacacacacacacacacacacacacacacaccccaaaccttttcatggggaatgtgtggcaaccttgccaaacagcaccactcagagtgtgactctgactgtgaccttggccttaatgaggaacttcttaggagagtttgaggacaaggccaacatcgtcatctgggctcgctgcgtcccagcacatcaaactctgtccagagacaaggccaactgcaaatgaaagccagggaacattgctaagggtctgtggctctgtggtggtgttcatcgccttcctgagataggatttcccttgccagtcccaacctgtatatattctgtacagaagacatccctgaatatactgtaggtgagtcgtccagccaaatttatatctccaaaacatttttagctttttctacatgctatgaattgagatgacatgctcaacttgtaaataagtctttttgtacattaaaaaagtaattttttcataatttatcttgtctatctgcttcccccttgacagtagttaatgagaacctgggcagtaaatttggtgcattcgagcagaaattaggctgtattttttcttaacagtgtcaaaattgactatcccgcctttgccaagaaatgtttaatgctgaggca

SEQ ID NO: 25 - protein, 451 aa, Homo sapiens
MNLEGGGRGGEFGMSAVSCGNGKLRQWLIDQIDSGKYPGLVWENEEKSIFRIPWKHAGKQDYNREEDAALFKAWALFKGKFREGIDKPDPPTWKTRLRCALNKSNDFEELVERSQLDISDPYKVYRIVPEGAKKGAKQLTLEDPQMSMSHPYTMTTPYPSLPAQQVHNYMMPPLDRSWRDYVPDQPHPEIPYQCPMTFGPRGHHWQGPACENGCQVTGTFYACAPPESQAPGVPTEPSIRSAEALAFSDCRLHICLYYREILVKELTTSSPEGCRISHGHTYDASNLDQVLFPYPEDNGQRKNIEKLLSHLERGVVLWMAPDGLYAKRLCQSRIYWDGPLALCNDRPNKLERDQTCKLFDTQQFLSELQAFAHHGRSLPRFQVTLCFGEEFPDPQRQRKLITAHVEPLLARQLYYFAQQNSGHFLRGYDLPEHISNPEDYHRSIRHSSIQE

SEQ ID NO: 26 - DNA, 5314 bp, Homo sapiens
  source 1..5314: mol_type = other DNA
agtttcaccgctcgatcttgggacccaccgctgccctcagctccgagtccagggcgagtgcagagcagagcgggcggaggaccccgggcgcgggcgcggacggcacgcggggcatgaacctggagggcggcggccgaggcggagagttcggcatgagcgcggtgagctgcggcaacgggaagctccgccagtggctgatcgaccagatcgacagcggcaagtaccccgggctggtgtgggagaacgaggagaagagcatcttccgcatcccctggaagcacgcgggcaagcaggactacaaccgcgaggaggacgccgcgctcttcaaggcttgggcactgtttaaaggaaagttccgagaaggcatcgacaagccggaccctcccacctggaagacgcgcctgcggtgcgctttgaacaagagcaatgactttgaggaactggttgagcggagccagctggacatctcagacccgtacaaagtgtacaggattgttcctgagggagccaaaaaaggagccaagcagctcaccctggaggacccgcagatgtccatgagccacccctacaccatgacaacgccttacccttcgctcccagcccagcaggttcacaactacatgatgccacccctcgaccgaagctggagggactacgtcccggatcagccacacccggaaatcccgtaccaatgtcccatgacgtttggaccccgcggccaccactggcaaggcccagcttgtgaaaatggttgccaggtgacaggaaccttttatgcttgtgccccacctgagtcccaggctcccggagtccccacagagccaagcataaggtctgccgaagccttggcgttctcagactgccggctgcacatctgcctgtactaccgggaaatcctcgtgaaggagctgaccacgtccagccccgagggctgccggatctcccatggacatacgtatgacgccagcaacctggaccaggtcctgttcccctacccagaggacaatggccagaggaaaaacattgagaagctgctgagccacctggagaggggcgtggtcctctggatggcccccgacgggctctatgcgaaaagactgtgccagagcaggatctactgggacgggcccctggcgctgtgcaacgaccggcccaacaaactggagagagaccagacctgcaagctctttgacacacagcagttcttgtcagagctgcaagcgtttgctcaccacggccgctccctgccaagattccaggtgactctatgctttggagaggagtttccagaccctcagaggcaaagaaagctcatcacagctcacgtagaacctctgctagccagacaactatattattttgctcaacaaaacagtggacatttcctgaggggctacgatttaccagaacacatcagcaatccagaagattaccacagatctatccgccattcctctattcaagaatgaaaaatgtcaagatgagtggttttctttttcctttttttttttttttttttgatacggggatacggggtcttgctctgtctcccaggctggagtgcagtgacacaatctcagctcactgtgacctccgcctcctgggttcaagagactctcctgcctcagcctccctggtagctgggattacaggtgtgagccactgcacccacccaagacaagtgattttcattgtaaatatttgactttagtgaaagcgtccaattgactgccctcttactgttttgaggaattcagaagtggagatttcagttcagcggttgaggagaattgcggcgagacaagcatggaaaatcagtgacatctgattggcagatgagcttatttcaaaaggaagggtggctttgcatttcttgtgttctgtagactgccatcattgatgatcactgtgaaaattgaccaagtgatgtgtttacatttactgaaatgcgctctttaatttgttgtagattaggtcttgctggaagacagagaaaacttgcctttcagtattgacactgactagagtgatgactgcttgtaggtatgtctgtgccatttctcagggaagtaagatgtaaattgaagaagcctcacacgtaaaagaaatgtattaatgtatgtaggagctgcagttcttgtggaagacacttgctgagtgaaggaaatgaatctttgactgaagccgtgcctgtagccttggggaggcccatcccccacctgccagcggtttcctggtgtgggtccctctgccccgccctccttcccattggctttctctccttggcctttcctggaagccagttagtaaacttcctattttcttgagtcaaaaaacatgagcgctactcttggatgggacatttttgtctgtcctacaatctagtaatgtctaagtaatggttaagttttcttgtttctgcatctttttgaccctcattctttagagatgctaaaattcttcgcataaagaagaagaaattaaggaacataaatcttaatacttgaactgttgcccttctgtccaagtacttaactatctgttcccttcctctgtgccacgctcctctgtttgtttggctgtccagcgatcagccatggcgacactaaaggaggaggagccggggactcccaggctggagagcactgccaggacccaccactggaagcaggatggagctgactacggaactgcacactcagtgggctgtttctgcttatttcatctgttctatgcttcctcgtgccaattatagtttgacagggccttaaaattacttggctttttccaaatgcttctatttatagaatcccaaagacctccacttgcttaagtatacctatcacttacatttttgtggttttgagaaagtacagcagtagactggggcgtcacctccaggccgtttctcatactacaggatatttactattactcccaggatcagcagaagattgcgtagctctcaaatgtgtgttcctgcttttctaatggatattttaaattcattcaacaagcacctagtaagtgcctgctgtatccctacattacacagttcagcctttatcaagcttagtgagcagtgagcactgaaacattattttttaatgtttaaaaagtttctaatattaaagtcagaatattaatacaattaatattaatattaactacagaaaagacaaacagtagagaacagcaaaaaaataaaaaggatctccttttttcccagcccaaattctcctctctaaaagtgtccacaagaaggggtgtttattcttccaacacatttcacttttctgtaaatatacataaacttaaaaagaaaacctcatggagtcatcttgcacacactttcatgcagtgctctttgtagctaacagtgaagatttacctcgttctgctcagaggccttgctgtggagctccactgccatgtacccagtagggtttgacatttcattagccatgcaacatggatatgtattgggcagcagactgtgtttcgtgaactgcagtgatgtatacatcttatagatgcaaagtattttggggtatattatcctaagggaagataaagatgatattaagaactgctgtttcacggggcccttacctgtgaccctctttgctgaagaatatttaaccccacacagcacttcaaagaagctgtcttggaagtctgtctcaggagcaccctgtcttcttaattctccaagcggatgctccatttcaattgctttgtgacttcttcttctttgtttttttaaatattatgctgctttaacagtggagctgaattttctggaaaatgcttcttggctggggccactacctcctttcctatctttacatctatgtgtatgttgactttttaaaattctgagtgatccagggtatgacctagggaatgaactagctatgaaatactcagggttaggaatcctagcacttgtctcaggactctgaaaaggaacggcttcctcattccttgtcttgataaagtggaattggcaaactagaatttagtttgtactcagtggacagtgctgttgaagatttgaggacttgttaaagagcactgggtcatatggaaaaaatgtatgtgtctcccaggtgcatttcttggtttatgtcttgttcttgagattttgtatatttaggaaaacctcaagcagtaattaatatctcctggaacactatagagaaccaagtgaccgactcatttacaactgaaacctaggaagcccctgagtcctgagcgaaaacaggagagttagtcgccctacagaaaacccagctagactattgggtatgaactaaaaagagactgtgccatggtgagaaaaatgtaaaatcctacagtgaaatgagcagcccttacagtattgttaccaccaagggcaggtaggtattagtgtttgaaaaagctggtctttgagcgagggcataaatacagctagccccaggggtggaacaactctgggagtcttgggtactcgcacctcttggctttgttgatgctccgccaggaaggccacttgtgtgtgcgtgtcagttacttttttagtaacaattcagatccagtgtaaacttccgttcattgctctccagtcacatgcccccacttccccacaggtgaaagtttttctgaaagtgttgggattggttaaggtctttatttgtattacgtatctccccaagtcctctgtggccagctgcatctgtctgaatggtgcgtgaaggctctcagaccttacacaccattttgtaagttatgttttacatgccccgtttttgagactgatctcgatgcaggtggatctccttgagatcctgatagcctgttacaggaatgaagtaaaggtcagtttttttttgtattgattttcacagctttgaggaacatgcataagaaatgtagctgaagtagaggggacgtgagagaagggccaggccggcaggccaaccctcctccaatggaaattcccgtgttgcttcaaactgagacagatgggacttaacaggcaatggggtccacttccccctcttcagcatcccccgtaccccactttctgctgaaagaactgccagcaggtaggaccccagaggcccccaaatgaaagcttgaatttcccctactggctctgcgttttgctgagatctgtaggaaaggatgcttcacaaactgaggtagataatgctatgctgtcgttggtatacatcatgaatttttatgtaaattgctctgcaaagcaaattgatatgtttgataaatttatgtttttaggtaaataaaaacttttaaaaatttgtta

SEQ ID NO: 27 - protein, 272 aa, Homo sapiens
MDSYLLMWGLLTFIMVPGCQAELCDDDPPEIPHATFKAMAYKEGTMLNCECKRGFRRIKSGSLYMLCTGNSSHSSWDNQCQCTSSATRNTTKQVTPQPEEQKERKTTEMQSPMQPVDQASLPGHCREPPPWENEATERIYHFVVGQMVYYQCVQGYRALHRGPAESVCKMTHGKTRWTQPQLICTGEMETSQFPGEEKPQASPEGRPESETSCLVTTTDFQIQTEMAATMETSIFTTEYQVAVAGCVFLLISVLLLSGLTWQRRQRKSRRTI

SEQ ID NO: 28 - DNA, 3218 bp, Homo sapiens
  source 1..3218: mol_type = other DNA
agtttcctggctgaacacgccagcccaatacttaaagagagcaactcctgactccgatagagactggatggacccacaagggtgacagcccaggcggaccgatcttcccatcccacatcctccggcgcgatgccaaaaagaggctgacggcaactgggccttctgcagagaaagacctccgcttcactgccccggctggtcccaagggtcaggaagatggattcatacctgctgatgtggggactgctcacgttcatcatggtgcctggctgccaggcagagctctgtgacgatgacccgccagagatcccacacgccacattcaaagccatggcctacaaggaaggaaccatgttgaactgtgaatgcaagagaggtttccgcagaataaaaagcgggtcactctatatgctctgtacaggaaactctagccactcgtcctgggacaaccaatgtcaatgcacaagctctgccactcggaacacaacgaaacaagtgacacctcaacctgaagaacagaaagaaaggaaaaccacagaaatgcaaagtccaatgcagccagtggaccaagcgagccttccaggtcactgcagggaacctccaccatgggaaaatgaagccacagagagaatttatcatttcgtggtggggcagatggtttattatcagtgcgtccagggatacagggctctacacagaggtcctgctgagagcgtctgcaaaatgacccacgggaagacaaggtggacccagccccagctcatatgcacaggtgaaatggagaccagtcagtttccaggtgaagagaagcctcaggcaagccccgaaggccgtcctgagagtgagacttcctgcctcgtcacaacaacagattttcaaatacagacagaaatggctgcaaccatggagacgtccatatttacaacagagtaccaggtagcagtggccggctgtgttttcctgctgatcagcgtcctcctcctgagtgggctcacctggcagcggagacagaggaagagtagaagaacaatctagaaaaccaaaagaacaagaatttcttggtaagaagccgggaacagacaacagaagtcatgaagcccaagtgaaatcaaaggtgctaaatggtcgcccaggagacatccgttgtgcttgcctgcgttttggaagctctgaagtcacatcacaggacacggggcagtggcaaccttgtctctatgccagctcagtcccatcagagagcgagcgctacccacttctaaatagcaatttcgccgttgaagaggaagggcaaaaccactagaactctccatcttattttcatgtatatgtgttcattaaagcatgaatggtatggaactctctccaccctatatgtagtataaagaaaagtaggtttacattcatctcattccaacttcccagttcaggagtcccaaggaaagccccagcactaacgtaaatacacaacacacacactctaccctatacaactggacattgtctgcgtggttcctttctcagccgcttctgactgctgattctcccgttcacgttgcctaataaacatccttcaagaactctgggctgctacccagaaatcattttacccttggctcaatcctctaagctaacccccttctactgagccttcagtcttgaatttctaaaaaacagaggccatggcagaataatctttgggtaacttcaaaacggggcagccaaacccatgaggcaatgtcaggaacagaaggatgaatgaggtcccaggcagagaatcatacttagcaaagttttacctgtgcgttactaattggcctctttaagagttagtttctttgggattgctatgaatgataccctgaatttggcctgcactaatttgatgtttacaggtggacacacaaggtgcaaatcaatgcgtacgtttcctgagaagtgtctaaaaacaccaaaaagggatccgtacattcaatgtttatgcaaggaaggaaagaaagaaggaagtgaagagggagaagggatggaggtcacactggtagaacgtaaccacggaaaagagcgcatcaggcctggcacggtggctcaggcctataaccccagctccctaggagaccaaggcgggagcatctcttgaggccaggagtttgagaccagcctgggcagcatagcaagacacatccctacaaaaaattagaaattggctggatgtggtggcatacgcctgtagtcctagccactcaggaggctgaggcaggaggattgcttgagcccaggagttcgaggctgcagtcagtcatgatggcaccactgcactccagcctgggcaacagagcaagatcctgtctttaaggaaaaaaagacaagatgagcataccagcagtccttgaacattatcaaaaagttcagcatattagaatcaccgggaggccttgttaaaagagttcgctgggcccatcttcagagtctctgagttgttggtctggaatagagccaaatgttttgtgtgtctaacaattcccaggtgctgttgctgctgctactattccaggaacacactttgagaaccattgtgttattgctctgcacgcccacccactctcaactcccacgaaaaaaatcaacttccagagctaagatttcggtggaagtcctggttccatatctggtgcaagatctcccctcacgaatcagttgagtcaacattctagctcaacaacatcacacgattaacattaacgaaaattattcatttgggaaactatcagccagttttcacttctgaaggggcaggagagtgttatgagaaatcacggcagttttcagcagggtccagattcagattaaataactattttctgtcatttctgtgaccaaccacatacaaacagactcatctgtgcactctccccctcccccttcaggtatatgttttctgagtaaagttgaaaagaatctcagaccagaaaatatagatatatatttaaatcttacttgagtagaactgattacgacttttgggtgttgaggggtctataagatcaaaacttttccatgataatactaagatgttatcgaccatttatctgtccttctctcaaaagtgtatggtggaattttccagaagctatgtgatacgtgatgatgtcatcactctgctgttaacatataataaatttattgctattgtttataaaagaataaatgatattttttaaaaa

SEQ ID NO: 29 - protein, 1189 aa, Homo sapiens
MVPCWNHGNITRSKAEELLSRTGKDGSFLVRASESISRAYALCVLYRNCVYTYRILPNEDDKFTVQASEGVSMRFFTKLDQLIEFYKKENMGLVTHLQYPVPLEEEDTGDDPEEDTVESVVSPPELPPRNIPLTASSCEAKEVPFSNENPRATETSRPSLSETLFQRLQSMDTSGLPEEHLKAIQDYLSTQLAQDSEFVKTGSSSLPHLKKLTTLLCKELYGEVIRTLPSLESLQRLFDQQLSPGLRPRPQVPGEANPINMVSKLSQLTSLLSSIEDKVKALLHEGPESPHRPSLIPPVTFEVKAESLGIPQKMQLKVDVESGKLIIKKSKDGSEDKFYSHKKILQLIKSQKFLNKLVILVETEKEKILRKEYVFADSKKREGFCQLLQQMKNKHSEQPEPDMITIFIGTWNMGNAPPPKKITSWFLSKGQGKTRDDSADYIPHDIYVIGTQEDPLSEKEWLEILKHSLQEITSVTFKTVAIHTLWNIRIVVLAKPEHENRISHICTDNVKTGIANTLGNKGAVGVSFMFNGTSLGFVNSHLTSGSEKKLRRNQNYMNILRFLALGDKKLSPFNITHRFTHLFWFGDLNYRVDLPTWEAETIIQKIKQQQYADLLSHDQLLTERREQKVFLHFEEEEITFAPTYRFERLTRDKYAYTKQKATGMKYNLPSWCDRVLWKSYPLVHVVCQSYGSTSDIMTSDHSPVFATFEAGVTSQFVSKNGPGTVDSQGQIEFLRCYATLKTKSQTKFYLEFHSSCLESFVKSQEGENEEGSEGELVVKFGETLPKLKPIISDPEYLLDQHILISIKSSDSDESYGEGCIALRLEATETQLPIYTPLTHHGELTGHFQGEIKLQTSQGKTREKLYDFVKTERDESSGPKTLKSLTSHDPMKQWEVTSRAPPCSGSSITEIINPNYMGVGPFGPPMPLHVKQTLSPDQQPTAWSYDQPPKDSPLGPCRGESPPTPPGQPPISPKKFLPSTANRGLPPRTQESRPSDLGKNAGDTLPQEDLPLTKPEMFENPLYGSLSSFPKPAPRKDQESPKMPRKEPPPCPEPGILSPSIVLTKAQEADRGEGPGKQVPAPRLRSFTCSSSAEGRAAGGDKSQGKPKTPVSSQAPVPAKRPIKPSRSEINQQTPPTPTPRPPLPVKSPAVLHLQHSKGRDYRDNTELPHHGKHRPEEGPPGPLGRTAMQ

SEQ ID NO: 30 - DNA, 4902 bp, Homo sapiens
  source 1..4902: mol_type = other DNA
agttaagctggtggcagcagccgaggccaccaagaggcaacgggcggcaggttgcagtggaggggcctccgctcccctcggtggtgtgtgggtcctgggggtgcctgccggcccggccgaggaggcccacgcccaccatggtcccctgctggaaccatggcaacatcacccgctccaaggcggaggagctgctttccaggacaggcaaggacgggagcttcctcgtgcgtgccagcgagtccatctcccgggcatacgcgctctgcgtgctgtatcggaattgcgtttacacttacagaattctgcccaatgaagatgataaattcactgttcaggcatccgaaggcgtctccatgaggttcttcaccaagctggaccagctcatcgagttttacaagaaggaaaacatggggctggtgacccatctgcaataccctgtgccgctggaggaagaggacacaggcgacgaccctgaggaggacacagtagaaagtgtcgtgtctccacccgagctgcccccaagaaacatcccgctgactgccagctcctgtgaggccaaggaggttcctttttcaaacgagaatccccgagcgaccgagaccagccggccgagcctctccgagacattgttccagcgactgcaaagcatggacaccagtgggcttccagaagagcatcttaaggccatccaagattatttaagcactcagctcgcccaggactctgaatttgtgaagacagggtccagcagtcttcctcacctgaagaaactgaccacactgctctgcaaggagctctatggagaagtcatccggaccctcccatccctggagtctctgcagaggttatttgaccagcagctctccccgggcctccgtccacgtcctcaggttcctggtgaggccaatcccatcaacatggtgtccaagctcagccaactgacaagcctgttgtcgtccattgaagacaaggtcaaggccttgctgcacgagggtcctgagtctccgcaccggccctcccttatccctccagtcacctttgaggtgaaggcagagtctctggggattcctcagaaaatgcagctcaaagtcgacgttgagtctgggaaactgatcattaagaagtccaaggatggttctgaggacaagttctacagccacaagaaaatcctgcagctcattaagtcacagaaatttctgaataagttggtgatcttggtggaaacagagaaggagaagatcctgcggaaggaatatgtttttgctgactccaaaaagagagaaggcttctgccagctcctgcagcagatgaagaacaagcactcagagcagccggagcccgacatgatcaccatcttcatcggcacctggaacatgggtaacgccccccctcccaagaagatcacgtcctggtttctctccaaggggcagggaaagacgcgggacgactctgcggactacatcccccatgacatttacgtgatcggcacccaagaggaccccctgagtgagaaggagtggctggagatcctcaaacactccctgcaagaaatcaccagtgtgacttttaaaacagtcgccatccacacgctctggaacatccgcatcgtggtgctggccaagcctgagcacgagaaccggatcagccacatctgtactgacaacgtgaagacaggcattgcaaacacactggggaacaagggagccgtgggggtgtcgttcatgttcaatggaacctccttagggttcgtcaacagccacttgacttcaggaagtgaaaagaaactcaggcgaaaccaaaactatatgaacattctccggttcctggccctgggcgacaagaagctgagtccctttaacatcactcaccgcttcacgcacctcttctggtttggggatcttaactaccgtgtggatctgcctacctgggaggcagaaaccatcatccagaaaatcaagcagcagcagtacgcagacctcctgtcccacgaccagctgctcacagagaggagggagcagaaggtcttcctacacttcgaggaggaagaaatcacgtttgccccaacctaccgttttgagagactgactcgggacaaatacgcctacaccaagcagaaagcgacagggatgaagtacaacttgccttcctggtgtgaccgagtcctctggaagtcttatcccctggtgcacgtggtgtgtcagtcttatggcagtaccagcgacatcatgacgagtgaccacagccctgtctttgccacatttgaggcaggagtcacttcccagtttgtctccaagaacggtcccgggactgttgacagccaaggacagattgagtttctcaggtgctatgccacattgaagaccaagtcccagaccaaattctacctggagttccactcgagctgcttggagagttttgtcaagagtcaggaaggagaaaatgaagaaggaagtgagggggagctggtggtgaagtttggtgagactcttccaaagctgaagcccattatctctgaccctgagtacctgctagaccagcacatcctcatcagcatcaagtcctctgacagcgacgaatcctatggcgagggctgcattgcccttcggttagaggccacagaaacgcagctgcccatctacacgcctctcacccaccatggggagttgacaggccacttccagggggagatcaagctgcagacctctcagggcaagacgagggagaagctctatgactttgtgaagacggagcgtgatgaatccagtgggccaaagaccctgaagagcctcaccagccacgaccccatgaagcagtgggaagtcactagcagggcccctccgtgcagtggctccagcatcactgaaatcatcaaccccaactacatgggagtggggccctttgggccaccaatgcccctgcacgtgaagcagaccttgtcccctgaccagcagcccacagcctggagctacgaccagccgcccaaggactccccgctggggccctgcaggggagaaagtcctccgacacctcccggccagccgcccatatcacccaagaagtttttaccctcaacagcaaaccggggtctccctcccaggacacaggagtcaaggcccagtgacctggggaagaacgcaggggacacgctgcctcaggaggacctgccgctgacgaagcccgagatgtttgagaaccccctgtatgggtccctgagttccttccctaagcctgctcccaggaaggaccaggaatcccccaaaatgccgcggaaggaacccccgccctgcccggaacccggcatcttgtcgcccagcatcgtgctcaccaaagcccaggaggctgatcgcggcgaggggcccggcaagcaggtgcccgcgccccggctgcgctccttcacgtgctcatcctctgccgagggcagggcggccggcggggacaagagccaagggaagcccaagaccccggtcagctcccaggccccggtgccggccaagaggcccatcaagccttccagatcggaaatcaaccagcagaccccgcccaccccgacgccgcggccgccgctgccagtcaagagcccggcggtgctgcacctccagcactccaagggccgcgactaccgcgacaacaccgagctcccgcatcacggcaagcaccggccggaggaggggccaccagggcctctaggcaggactgccatgcagtgaagccctcagtgagctgccactgagtcgggagcccagaggaacggcgtgaagccactggaccctctcccgggacctcctgctggctcctcctgcccagcttcctatgcaaggctttgtgttttcaggaaagggcctagcttctgtgtggcccacagagttcactgcctgtgagacttagcaccaagtgctgaggctggaagaaaaacgcacaccagacgggcaacaaacagtctgggtccccagctcgctcttggtacttgggaccccagtgcctcgttgagggcgccattctgaagaaaggaactgcagcgccgatttgagggtggagatatagataataataatattaataataataatggccacatggatcgaacactcatgatgtgccaagtgctgtgctaagtgctttacgaacattcgtcatatcaggatgacctcgagagctgaggctctagccacctaaaaccacgtgcccaaacccaccagtttaaaacggtgtgtgttcggaggggtgaaagcattaagaagcccagtgccctcctggagtgagacaagggctcggccttaaggagctgaagagtctgggtagcttgtttagggtacaagaagcctgttctgtccagcttcagtgacacaagctgctttagctaaagtcccgcgggttccggcatggctaggctgagagcagggatctacctggcttctcagttctttggttggaaggagcaggaaatcagctcctattctccagtggagagatctggcctcagcttgggctagagatgccaaggcctgtgccaggttccctgtgccctcctcgaggtgggcagccatcaccagccacagttaagccaagccccccaacatgtattccatcgtgctggtagaagagtctttgctgttgctcccgaaagccgtgctctccagcctggctgccagggagggtgggcctcttggttccaggctcttgaaatagtgcagccttttcttcctatctctgtggctttcagctctgcttccttggttattaggagaatagatgggtgatgtctttccttatgttgctttttcaacatagcagaattaatgtagggagctaaatccagtggtgtgtgtgaatgcagaagggaatgcaccccacattcccatgatggaagtctgcgtaaccaataaattgtgcctttctcactca

SEQ ID NO: 31 - protein, 551 aa, Homo sapiens
MAAPALSWRLPLLILLLPLATSWASAAVNGTSQFTCFYNSRANISCVWSQDGALQDTSCQVHAWPDRRRWNQTCELLPVSQASWACNLILGAPDSQKLTTVDIVTLRVLCREGVRWRVMAIQDFKPFENLRLMAPISLQVVHVETHRCNISWEISQASHYFERHLEFEARTLSPGHTWEEAPLLTLKQKQEWICLETLTPDTQYEFQVRVKPLQGEFTTWSPWSQPLAFRTKPAALGKDTIPWLGHLLVGLSGAFGFIILVYLLINCRNTGPWLKKVLKCNTPDPSKFFSQLSSEHGGDVQKWLSSPFPSSSFSPGGLAPEISPLEVLERDKVTQLLLQQDKVPEPASLSSNHSLTSCFTNQGYFFFHLPDALEIEACQVYFTYDPYSEEDPDEGVAGAPTGSSPQPLQPLSGEDDAYCTFPSRDDLLLFSPSLLGGPSPPSTAPGGSGAGEERMPPSLQERVPRDWDPQPLGPPTPGVPDLVDFQPPPELVLREAGEEVPDAGPREGVSFPWSRPPGQGEFRALNARLPLNTDAYLSLQELQGQDPTHLV

SEQ ID NO: 32 - DNA, 4034 bp, Homo sapiens
  source 1..4034: mol_type = other DNA
agagctcagcagggccctggagagatggccacggtcccagcaccggggaggactggagagcgcgcgctgccaccgccccatgtctcagccagggcttccttcctcggctccaccctgtggatgtaatggcggcccctgctctgtcctggcgtctgcccctcctcatcctcctcctgcccctggctacctcttgggcatctgcagcggtgaatggcacttcccagttcacatgcttctacaactcgagagccaacatctcctgtgtctggagccaagatggggctctgcaggacacttcctgccaagtccatgcctggccggacagacggcggtggaaccaaacctgtgagctgctccccgtgagtcaagcatcctgggcctgcaacctgatcctcggagccccagattctcagaaactgaccacagttgacatcgtcaccctgagggtgctgtgccgtgagggggtgcgatggagggtgatggccatccaggacttcaagccctttgagaaccttcgcctgatggcccccatctccctccaagttgtccacgtggagacccacagatgcaacataagctgggaaatctcccaagcctcccactactttgaaagacacctggagttcgaggcccggacgctgtccccaggccacacctgggaggaggcccccctgctgactctcaagcagaagcaggaatggatctgcctggagacgctcaccccagacacccagtatgagtttcaggtgcgggtcaagcctctgcaaggcgagttcacgacctggagcccctggagccagcccctggccttcaggacaaagcctgcagcccttgggaaggacaccattccgtggctcggccacctcctcgtgggcctcagcggggcttttggcttcatcatcttagtgtacttgctgatcaactgcaggaacaccgggccatggctgaagaaggtcctgaagtgtaacaccccagacccctcgaagttcttttcccagctgagctcagagcatggaggagacgtccagaagtggctctcttcgcccttcccctcatcgtccttcagccctggcggcctggcacctgagatctcgccactagaagtgctggagagggacaaggtgacgcagctgctcctgcagcaggacaaggtgcctgagcccgcatccttaagcagcaaccactcgctgaccagctgcttcaccaaccagggttacttcttcttccacctcccggatgccttggagatagaggcctgccaggtgtactttacttacgacccctactcagaggaagaccctgatgagggtgtggccggggcacccacagggtcttccccccaacccctgcagcctctgtcaggggaggacgacgcctactgcaccttcccctccagggatgacctgctgctcttctcccccagtctcctcggtggccccagccccccaagcactgcccctgggggcagtggggccggtgaagagaggatgcccccttctttgcaagaaagagtccccagagactgggacccccagcccctggggcctcccaccccaggagtcccagacctggtggattttcagccaccccctgagctggtgctgcgagaggctggggaggaggtccctgacgctggccccagggagggagtcagtttcccctggtccaggcctcctgggcagggggagttcagggcccttaatgctcgcctgcccctgaacactgatgcctacttgtccctccaagaactccagggtcaggacccaactcacttggtgtagacagatggccagggtgggaggcaggcagctgcctgctctgcgccgagcctcagaaggaccctgttgagggtcctcagtccactgctgaggacactcagtgtccagttgcagctggacttctccacccggatggcccccacccagtcctgcacacttggtccatccatttccaaacctccactgctgctcccgggtcctgctgcccgagccaggaactgtgtgtgttgcaggggggcagtaactccccaactccctcgttaatcacaggatcccacgaatttaggctcagaagcatcgctcctctccagccctgcagctattcaccaatatcagtcctcgcggctctccagggctccctgccctgacctcttccctgggttttctgccccagcctcctccttccctcccctccccgtccacagggcagcctgagcgtgctttccaaaacccaaatatggccacgctccccctcggttcaaaaccttgcacaggtcccactgccctcagccccacttctcagcctggtacttgtacctccggtgtcgtgtggggacatccccttctgcaatcctccctaccgtcctcctgagccactcagagctccctcacaccccctctgttgcacatgctattccctggggctgctgtgcgctccccctcatctaggtgacaaacttccctgactcttcaagtgccggttttgcttctcctggagggaagcactgcctcccttaatctgccagaaacttctagcgtcagtgctggagggagaagctgtcagggacccagggcgcctggagaaagaggccctgttactattcctttgggatctctgaggcctcagagtgcttggctgctgtatctttaatgctggggcccaagtaagggcacagatccccccacaaagtggatgcctgctgcatcttcccacagtggcttcacagacccacaagagaagctgatggggagtaaaccctggagtccgaggcccaggcagcagccccgcctagtggtgggccctgatgctgccaggcctgggacctcccactgccccctccactggaggggtctcctctgcagctcagggactggcacactggcctccagaagggcagctccacagggcagggcctcattatttttcactgccccagacacagtgcccaacaccccgtcgtataccctggatgaacgaattaattacctggcaccacctcgtctgggctccctgcgcctgacattcacacagagaggcagagtcccgtgcccattaggtctggcatgccccctcctgcaaggggctcaaccccctaccccgacccctccacgtatctttcctaggcagatcacgttgcaatggctcaaacaacattccaccccagcaggacagtgaccccagtcccagctaactctgacctgggagccctcaggcacctgcacttacaggccttgctcacagctgattgggcacctgaccacacgcccccacaggctctgaccagcagcctatgagggggtttggcaccaagctctgtccaatcaggtaggctgggcctgaactagccaatcagatcaactctgtcttgggcgtttgaactcagggagggaggcccttgggagcaggtgcttgtggacaaggctccacaagcgttgagccttggaaaggtagacaagcgttgagccactaagcagaggaccttgggttcccaatacaaaaatacctactgctgagagggctgctgaccatttggtcaggattcctgttgcctttatatccaaaataaactcccctttcttgaggttgtctgagtcttgggtctatgccttgaaaaaagctgaattattggacagtctcacctcctgccatagggtcctgaatgtttcagaccacaaggggctccacacctttgctgtgtgttctggggcaacctactaatcctctctgcaagtcggtctccttatccccccaaatggaaattgtatttgccttctccactttgggaggctcccacttcttgggagggttacattttttaagtcttaatcatttgtgacatatgtatctatacatccgtatcttttaatgatccgtgtgtaccatctttgtgattatttccttaatattttttctttaagtcagttcattttcgttgaaatacatttatttaaagaaaaatctttgttactctgtaaatgaaaaaacccattttcgctataaataaaaggtaactgtacaaaataagtacaatgcaa

SEQ ID NO: 33 - protein, 461 aa, Homo sapiens
MTLPGGPTGMARPGGARPCSPGLERAPRRSVGELRLLFEARCAAVAAAAAAGEPRARGAKRRGGQVPNGLPRAPPAPVIPQLTVTAEEPDVPPTSPGPPERERDCLPAAGSSHLQQPRRLSTSSVSSTGSSSLLEDSEDDLLSDSESRSRGNVQLEAGEDVGQKNHWQKIRTMVNLPVISPFKKRYAWVQLAGHTGSFKAAGTSGLILKRCSEPERYCLARLMADALRGCVPAFHGVVERDGESYLQLQDLLDGFDGPCVLDCKMGVRTYLEEELTKARERPKLRKDMYKKMLAVDPEAPTEEEHAQRAVTKPRYMQWREGISSSTTLGFRIEGIKKADGSCSTDFKTTRSREQVLRVFEEFVQGDEEVLRRYLNRLQQIRDTLEVSEFFRRHEVIGSSLLFVHDHCHRAGVWLIDFGKTTPLPDGQILDHRRPWEEGNREDGYLLGLDNLIGILASLAER

SEQ ID NO: 34 - DNA, 1825 bp, Homo sapiens
  source 1..1825: mol_type = other DNA
agtccccggcgcgccgcgggctggtgggctcagcggcggcgccggcactgggaaatgaccctgcccgggggcccaacgggcatggcgcggccggggggcgcgaggccctgcagcccggggctggagcgggccccgcgccggagtgtcggggagctgcgcctgctcttcgaggcgcgctgtgcggcggtcgctgcggccgccgccgcgggggagccccgggcccgcggggccaagcggcgtgggggacaggtccccaacgggcttccgcgggctcccccggccccggtgatccctcagctgaccgtgacagccgaggagcccgacgtgcccccgaccagccctgggccgccggagcgggagagggactgcctcccggcagcgggctcttcgcacctgcagcagccgcgccgcctttccacctcgtcggtctcctccactggctcctcgtcgctgctcgaggactcggaggacgacctgctgagcgacagtgagagccggagccgcggcaacgtgcagctggaagcgggcgaggacgtgggtcagaaaaaccactggcagaagatccggaccatggtcaatctgccggtcataagccctttcaagaagcgctacgcctgggtgcagctggcagggcacactgggagttttaaggcggcgggcaccagcgggctgatcctgaagcgctgctcggagccggagcgctactgcctggcgcggctgatggctgacgcgctgcgcggctgcgtgcctgccttccacggcgtggtggagcgcgacggcgaaagctacctgcagctgcaggacctgctcgatggcttcgacggaccttgtgtgctcgactgcaaaatgggcgtcaggacttacctagaggaggagctgaccaaggcccgtgagcggcccaagctgcggaaggacatgtacaagaaaatgctggcggtggatcctgaagctcccacggaggaggagcacgcgcagcgcgccgtcaccaagccgcgctacatgcagtggcgggaaggcatcagctccagcaccaccctcggcttccgcatcgagggcatcaagaaagcggacggctcctgcagcaccgacttcaagactacgcgaagccgagagcaggtgcttcgcgtctttgaagagtttgtgcaaggagatgaggaagtgctgaggcggtatctgaaccgcctgcagcagatccgggacaccctggaggtatccgagttcttcaggaggcacgaggtgatcggcagctcgctcctctttgtgcacgatcactgccatcgcgccggcgtgtggctcatcgacttcggcaagaccacgcccctccccgatggccagatcctggaccaccggcggccctgggaggagggcaaccgcgaggacggctatttgctggggctggacaatctcattggcatcctggccagcctggctgagagatgaggctggactcctgtccccgcgggccgctcacctgacatgtggacctgcagctttgtccccactgtgcatgccggcttgagactggagccccgcggtgcagggcagttcaccgggtcctgcaggaccaggtgccagccactaagggggggcaccgccgatgccaggggttttgcccacccgggccccagcgttcccagagccaaatgacactaacttatagaaggggagggggcaaagggcttcttcctcaggccagctcttctgaggaggctctgccctctccagaggtgccagaccgcggattttatttagcaagcccagaccttccggtctaacgtctcacaccacgacggactccccttcctaataaaactcaaagacaaga

SEQ ID NO: 35 - protein, 946 aa, Homo sapiens
MAVYCYALNSLVIMNSANEMKSGGGPGPSGSETPPPPRRAVLSPGSVFSPGRGASFLFPPAESLSPEEPRSPGGWRSGRRRLNSSSGSGSGSSGSSVSSPSWAGRLRGDRQQVVAAGTLSPPGPEEAKRKLRILQRELQNVQVNQKVGMFEAHIQAQSSAIQAPRSPRLGRARSPSPCPFRSSSQPPGRVLVQGARSEERRTKSWGEQCPETSGTDSGRKGGPSLCSSQVKKGMPPLPGRAAPTGSEAQGPSAFVRMEKGIPASPRCGSPTAMEIDKRGSPTPGTRSCLAPSLGLFGASLTMATEVAARVTSTGPHRPQDLALTEPSGRARELEDLQPPEALVERQGQFLGSETSPAPERGGPRDGEPPGKMGKGYLPCGMPGSGEPEVGKRPEETTVSVQSAESSDSLSWSRLPRALASVGPEEARSGAPVGGGRWQLSDRVEGGSPTLGLLGGSPSAQPGTGNVEAGIPSGRMLEPLPCWDAAKDLKEPQCPPGDRVGVQPGNSRVWQGTMEKAGLAWTRGTGVQSEGTWESQRQDSDALPSPELLPQDPDKPFLRKACSPSNIPAVIITDMGTQEDGALEETQGSPRGNLPLRKLSSSSASSTGFSSSYEDSEEDISSDPERTLDPNSAFLHTLDQQKPRVSKSWRKIKNMVHWSPFVMSFKKKYPWIQLAGHAGSFKAAANGRILKKHCESEQRCLDRLMVDVLRPFVPAYHGDVVKDGERYNQMDDLLADFDSPCVMDCKMGIRTYLEEELTKARKKPSLRKDMYQKMIEVDPEAPTEEEKAQRAVTKPRYMQWRETISSTATLGFRIEGIKKEDGTVNRDFKKTKTREQVTEAFREFTKGNHNILIAYRDRLKAIRTTLEVSPFFKCHEVIGSSLLFIHDKKEQAKVWMIDFGKTTPLPEGQTLQHDVPWQEGNREDGYLSGLNNLVDILTEMSQDAPLA

SEQ ID NO: 36 - DNA, 6269 bp, Homo sapiens
  source 1..6269: mol_type = other DNA
gggcagtatctccacggtcgaaaagggcgtgcagggccggcttggcgtcgccactgccgggatcgccgggcccctgaaccgaagagctttcccccctctttcgcactcctcttttttgtcttccatagcttgtgagaaaataatttctgagcatttttacttttaaagccatctcgtccctacgaggtttgcgcctctgggcatgtagtctacacaggacctgagaatctgagaaactgcagccgcacggttgtttatggagctttgggcgggggctgagcccgcggtcgtgcccccagcccgctgcccaggccatgccgccccatctgcgcgcggagccgcggctgccgggcctccggggctgagccgggagcgccgggaggaggaggcgccggcggcggagcaggagcgggagccgcggcggcgggcagcgcgggacccagtactatggctgtgtactgctatgcgctcaatagcctggtgatcatgaatagcgccaacgagatgaagagcggcggcggcccggggcccagtggcagcgagacgcccccgcccccgaggagggcagtgctgagccccggcagcgttttcagccccgggagaggcgcctctttcctcttccccccagccgagtcgctgtcccccgaggagccccggagccccgggggctggcggagcggccggcgcaggctgaatagtagcagcggcagtggcagcggcagcagcggcagtagcgtgagcagcccaagttgggctggtcgcctgcgaggggaccggcagcaggtggtggcagccggtaccctctccccgccagggccggaggaggccaagaggaagctgcggatcttgcagcgcgagttgcagaacgtgcaggtgaaccagaaagtgggcatgtttgaggcgcacatccaggcacagagctccgccattcaagcgccccgcagcccgcgtttgggcagggctcgctcgccctccccgtgccccttccgcagcagcagtcagccccctggaagggtcctggttcagggcgcccggagcgaggaacggaggacaaagtcctggggggagcaatgtccagagacttcaggaaccgactccgggaggaaaggagggcccagcctatgctcctcgcaggtgaagaaaggaatgccacctcttcccggccgggctgcccctacaggatcagaggctcagggtccatccgcttttgtaaggatggagaagggtatccctgccagtccccgctgtggctcacccacagctatggaaattgacaaaaggggctctcctaccccgggaactcggagctgcctagctccctcattggggctgttcggagctagcttaacgatggccacggaagtggcagcgagagttacatccactgggccacaccgtccacaggatcttgccctcactgagccgtctgggagagcccgtgagcttgaggacctgcagcccccagaggccctggtggagaggcaggggcagtttctgggcagtgagacaagcccagccccagaaaggggcgggccccgcgatggagaaccccctgggaagatggggaaaggatatctgccctgtggcatgccgggctctggggagcctgaagtgggcaaaaggccagaggagacgactgtgagcgtgcaaagcgcagagtcctctgattccctgagctggtccaggctgcccagggccctggcctccgtaggccctgaggaggcccgaagtggggcccccgtgggcggggggcgttggcagctctccgacagagtggagggagggtccccaacgctgggcttgcttgggggcagcccctcagcacagccggggaccgggaatgtggaggcgggaattccttctggcagaatgctggagcctttgccctgttgggacgctgcgaaagatctgaaagaacctcagtgccctcctggggacagggtgggtgtgcagcctgggaactccagggtttggcagggcaccatggagaaagccggtttggcttggacgcgtggcacaggggtgcaatcagaggggacttgggaaagccagcggcaggacagtgatgccctcccaagtccggagctgctaccccaagatccggacaagcctttcctgaggaaggcctgcagccccagcaacatacctgctgtcatcattacagacatgggcacccaggaggatggggccttggaggagacgcagggaagccctcggggcaacctgcccctgaggaaactgtcctcttcctcggcctcctccacgggcttctcctcatcctacgaagactcagaggaggacatctccagtgaccctgagcgcaccctggaccccaactcagccttcctgcataccctggaccagcagaaacctagagtgagcaaatcatggaggaagataaaaaacatggtgcactggtctcccttcgtcatgtccttcaagaagaagtacccctggatccagctggcaggacacgcagggagtttcaaggcagctgccaatggcaggatcctgaagaagcactgtgagtcagagcagcgctgcctggaccggctgatggtggatgtgctgaggcccttcgtacctgcctaccatggggatgtggtgaaggacggggagcgctacaaccagatggacgacctgctggccgacttcgactcgccctgtgtgatggactgcaagatgggaatcaggacctacctggaggaggagctcacgaaggcccggaagaagcccagcctgcggaaggacatgtaccagaagatgatcgaggtggaccccgaggcccccaccgaggaggaaaaagcacagcgggctgtgaccaagccacggtacatgcagtggcgggagaccatcagctccacggccaccctggggttcaggatcgagggaatcaagaaagaagacggcaccgtgaaccgggacttcaagaagaccaaaacgagggagcaggtcaccgaggccttcagagagttcactaaaggaaaccataacatcctgatcgcctatcgggaccggctgaaggccattcgaaccactctagaagtttctcccttcttcaagtgccacgaggtcattggcagctccctcctcttcatccacgacaagaaggaacaggccaaagtgtggatgatcgactttgggaaaaccacgcccctgcctgagggccagaccctgcagcatgacgtcccctggcaggaggggaaccgggaggatggctacctctcggggctcaataacctcgtcgacatcctgaccgagatgtcccaggatgccccactcgcctgagctgcccacgccctccctggcccccgcctgggcctcctttcctcctcctgtgcttcctttctcgttcctaacttttccttcacttacacctgactgaccctcctgaactgcactacaagacactttgtagaagaggagatgagagtttctagtcattttcctaacttcagggcttggaggtggtgtttgcactgctttttgtagagagggtcacctactagaagagaaatgcccagtcttagaggtgggtcaggtgtagagctggagggggtccctggctgctgaggggaccctaccagatgagccctgcctctgggagccccctaggaagcaccagcctggacctaccacctgcggaggcctgctgccccctggcggccagtgctgttagagtgctgccaagcacagccttatttctgccggggcctccccaccggagagcccagggggccggccgggttcctggtccctggctgggagcagggctttctggtagttggggcacaaaaccatcggggaaccacatgttgactgtgagcaaagtgtcttccgattagcagcctcagggatgccctggtggcctctccagggctgctcaggcaaggccccccacccatctggtatggaaacctgccggctccaggccagacccaggagccaagagaaggctgaagccagcttggctgtgttctctgatctaggccttcccagaggaggcgagcagaagctgtgccacttggaattgcaacccatgagttcagaaggcacactctgccatgctgagctccaagggtgctaccaggggaagatgggatctatagagtctctgggccctggccccagggaggagcacatttttcttgaccctcacctacctggtgctagttggtcaaccctgcctgcatacatgggctcctgtcatggggcccagagtcccttgcagatatagaaataggggaggagctcaggtctgcgccaggcaggaagaaggcaggcttctggcttccagaggtgccgcggtggcctcctggcatcatttgttattgcctctgaaacaagccttactgcctggagggcttagattcctgcttctccaatgtagtgtgggtatcttgtagggtatgtggtggatgccagggcgtgctccaggcacctcttcctgaagtctctgcatttggagattcgtggagaacctatttaagcccaattttaactgaaagccagtgagtctgatatggaagggaatgtaaaatttgcctgacttcttaagaacaaaacccccagctctgtgccccatgctccttggggcttgccacccactcctttgctgtcagaggtacaggagctgggagagtccaggagctagggacacagagggagactatggaccaaggtgtgtgtgtctggaggaaccactgcccaccccaccaccccggggtctctggggaactgtcaacctgcccacgggacatgtacatttccccttttgtgctggaagtgtgagtgacacttgctgggggtggagggtgggacacatgaggatgtataagtacagattttaaaaaaggaaatcaacttacacttcctggctcttgtttaaaacagtggtgagctcctgtgtgggccgacttgctaaaggtcacacacgcgcccggtggagcacgagagacctcgtggcagcatgtgatctggaaggcaggcaggacgggggcgttggggagccaaagtcaactctgggcctctggagctatagtgacttttgggctagaagggaccctggtggtctgtgcttcagccatttgcagggcaggggcatcattaattcagacgtaaagattctatgaatatggactggccaaaagttatccttactccatctgtgaaagaagtttgctaaagcaaatcatgatatgaacaaaaattacaggggacctgtttaagagaacaaaatgttccaagcactttaggcagacaccagctgtttgcaaacaatgtgctaatatgcaaatgatgtgcttattaaaggaggcccatggggcctcttattggcaatacttggctgtgggttacattaaatatgtgaacatagtatgaagtagcatcattttagggttattctgttacttagggtttttgttttctgttttttttttctctttttttgtatttaccgtgctagttctcttctacacctactctgtctctcaagccattttgccactcgcttccctgccatctggcccttccctttgtctcagtgggatagatggattgtgaaatggaatctcccagaacccctgccctggcagcctggaagaccgtgcctgcccagccctcgtcaccacagggactccttgggtcctggcagtgcatgtgccagcaggcaggacaaactctgtgtacctgtgcccaggtgaatgggcgcagggtcctcttgccctgtcctgcggggggccccacgagttcctggcattcagcactgcttagcattctcggaaggtttcttcaactgcttgcttttcccaggcttgcctttagtgtcatgtaagacatttttaagttatatttattttgttgggttttaaaattgcacagaacactaagaccgaaaggctggactcttgtttctccttgaaagctttgcctttgttttgaacttcctttcccacttggtagaaagagcccagaagcagccctggccctgtaagatggactctttcatccttcagttgtatttagctttgagtttctctgcatctgtccaccccatgtgtatataacccagcccctggctctggggtggtcacctcgtcagtgccttttgttctggaggagaggaccccccccgcctgccgagaggctctcttcctgttctgcacccctctccccatgggaccttggagaaaactgaactgttacaaacccctgcacagtgcctgtcaaacagatgcaaaccttcctgaataaagccttggagacca

SEQ ID NO: 37 - protein, 178 aa, Homo sapiens
MHSSALLCCLVLLTGVRASPGQGTQSENSCTHFPGNLPNMLRDLRDAFSRVKTFFQMKDQLDNLLLKESLLEDFKGYLGCQALSEMIQFYLEEVMPQAENQDPDIKAHVNSLGENLKTLRLRLRRCHRFLPCENKSKAVEQVKNAFNKLQEKGIYKAMSEFDIFINYIEAYMTMKIRN

SEQ ID NO: 38 - DNA, 1630 bp, Homo sapiens
  source 1..1630: mol_type = other DNA
acacatcaggggcttgctcttgcaaaaccaaaccacaagacagacttgcaaaagaaggcatgcacagctcagcactgctctgttgcctggtcctcctgactggggtgagggccagcccaggccagggcacccagtctgagaacagctgcacccacttcccaggcaacctgcctaacatgcttcgagatctccgagatgccttcagcagagtgaagactttctttcaaatgaaggatcagctggacaacttgttgttaaaggagtccttgctggaggactttaagggttacctgggttgccaagccttgtctgagatgatccagttttacctggaggaggtgatgccccaagctgagaaccaagacccagacatcaaggcgcatgtgaactccctgggggagaacctgaagaccctcaggctgaggctacggcgctgtcatcgatttcttccctgtgaaaacaagagcaaggccgtggagcaggtgaagaatgcctttaataagctccaagagaaaggcatctacaaagccatgagtgagtttgacatcttcatcaactacatagaagcctacatgacaatgaagatacgaaactgagacatcagggtggcgactctatagactctaggacataaattagaggtctccaaaatcggatctggggctctgggatagctgacccagccccttgagaaaccttattgtacctctcttatagaatatttattacctctgatacctcaacccccatttctatttatttactgagcttctctgtgaacgatttagaaagaagcccaatattataatttttttcaatatttattattttcacctgtttttaagctgtttccatagggtgacacactatggtatttgagtgttttaagataaattataagttacataagggaggaaaaaaaatgttctttggggagccaacagaagcttccattccaagcctgaccacgctttctagctgttgagctgttttccctgacctccctctaatttatcttgtctctgggcttggggcttcctaactgctacaaatactcttaggaagagaaaccagggagcccctttgatgattaattcaccttccagtgtctcggagggattcccctaacctcattccccaaccacttcattcttgaaagctgtggccagcttgttatttataacaacctaaatttggttctaggccgggcgcggtggctcacgcctgtaatcccagcactttgggaggctgaggcgggtggatcacttgaggtcaggagttcctaaccagcctggtcaacatggtgaaaccccgtctctactaaaaatacaaaaattagccgggcatggtggcgcgcacctgtaatcccagctacttgggaggctgaggcaagagaattgcttgaacccaggagatggaagttgcagtgagctgatatcatgcccctgtactccagcctgggtgacagagcaagactctgtctcaaaaaataaaaataaaaataaatttggttctaatagaactcagttttaactagaatttattcaattcctctgggaatgttacattgtttgtctgtcttcatagcagattttaattttgaataaataaatgtatcttattcacatca

SEQ ID NO: 39 - protein, 521 aa, Homo sapiens
MGLGRCIWEGWTLESEALRRDMGTWLLACICICTCVCLGVSVTGEGQGPRSRTFTCLTNNILRIDCHWSAPELGQGSSPWLLFTSNQAPGGTHKCILRGSECTVVLPPEAVLVPSDNFTITFHHCMSGREQVSLVDPEYLPRRHVKLDPPSDLQSNISSGHCILTWSISPALEPMTTLLSYELAFKKQEEAWEQAQHRDHIVGVTWLILEAFELDPGFIHEARLRVQMATLEDDVVEEERYTGQWSEWSQPVCFQAPQRQGPLIPPWGWPGNTLVAVSIFLLLTGPTYLLFKLSPRVKRIFYQNVPSPAMFFQPLYSVHNGNFQTWMGAHGAGVLLSQDCAGTPQGALEPCVQEATALLTCGPARPWKSVALEEEQEGPGTRLPGNLSSEDVLPAGCTEWRVQTLAYLPQEDWAPTSLTRPAPPDSEGSRSSSSSSSSNNNNYCALGCYGGWHLSALPGNTQSSGPIPALACGLSCDHQGLETQQGVAWVLAGHCQRPGLHEDLQGMLLPSVLSKARSWTF

SEQ ID NO: 40 - DNA, 2038 bp, Homo sapiens
  source 1..2038: mol_type = other DNA
gctgtgcacccagagatagttgggtgacaaatcacctccaggttggggatgcctcagacttgtgatgggactgggcagatgcatctgggaaggctggaccttggagagtgaggccctgaggcgagacatgggcacctggctcctggcctgcatctgcatctgcacctgtgtctgcttgggagtctctgtcacaggggaaggacaagggccaaggtctagaaccttcacctgcctcaccaacaacattctcaggatcgattgccactggtctgccccagagctgggacagggctccagcccctggctcctcttcaccagcaaccaggctcctggcggcacacataagtgcatcttgcggggcagtgagtgcaccgtcgtgctgccacctgaggcagtgctcgtgccatctgacaatttcaccatcactttccaccactgcatgtctgggagggagcaggtcagcctggtggacccggagtacctgccccggagacacgttaagctggacccgccctctgacttgcagagcaacatcagttctggccactgcatcctgacctggagcatcagtcctgccttggagccaatgaccacacttctcagctatgagctggccttcaagaagcaggaagaggcctgggagcaggcccagcacagggatcacattgtcggggtgacctggcttatacttgaagcctttgagctggaccctggctttatccatgaggccaggctgcgtgtccagatggccacactggaggatgatgtggtagaggaggagcgttatacaggccagtggagtgagtggagccagcctgtgtgcttccaggctccccagagacaaggccctctgatcccaccctgggggtggccaggcaacacccttgttgctgtgtccatctttctcctgctgactggcccgacctacctcctgttcaagctgtcgcccagggtgaagagaatcttctaccagaacgtgccctctccagcgatgttcttccagcccctctacagtgtacacaatgggaacttccagacttggatgggggcccacggggccggtgtgctgttgagccaggactgtgctggcaccccacagggagccttggagccctgcgtccaggaggccactgcactgctcacttgtggcccagcgcgtccttggaaatctgtggccctggaggaggaacaggagggccctgggaccaggctcccggggaacctgagctcagaggatgtgctgccagcagggtgtacggagtggagggtacagacgcttgcctatctgccacaggaggactgggcccccacgtccctgactaggccggctcccccagactcagagggcagcaggagcagcagcagcagcagcagcagcaacaacaacaactactgtgccttgggctgctatgggggatggcacctctcagccctcccaggaaacacacagagctctgggcccatcccagccctggcctgtggcctttcttgtgaccatcagggcctggagacccagcaaggagttgcctgggtgctggctggtcactgccagaggcctgggctgcatgaggacctccagggcatgttgctcccttctgtcctcagcaaggctcggtcctggacattctaggtccctgactcgccagatgcatcatgtccattttgggaaaatggactgaagtttctggagcccttgtctgagactgaacctcctgagaaggggcccctagcagcggtcagaggtcctgtctggatggaggctggaggctcccccctcaacccctctgctcagtgcctgtggggagcagcctctaccctcagcatcctggccacaagttcttccttccattgtcccttttctttatccctgacctctctgagaagtggggtgtggtctctcagctgttctgccctcatacccttaaagggccagcctgggcccagtggacacaggtaaggcaccatgaccacctggtgtgacctctctgtgccttactgaggcacctttctagagattaaaaggggcttgatggctgtt

SEQ ID NO: 41 - protein, 1097 aa, Homo sapiens
MMDIYVCLKRPSWMVDNKRMRTASNFQWLLSTFILLYLMNQVNSQKKGAPHDLKCVTNNLQVWNCSWKAPSGTGRGTDYEVCIENRSRSCYQLEKTSIKIPALSHGDYEITINSLHDFGSSTSKFTLNEQNVSLIPDTPEILNLSADFSTSTLYLKWNDRGSVFPHRSNVIWEIKVLRKESMELVKLVTHNTTLNGKDTLHHWSWASDMPLECAIHFVEIRCYIDNLHFSGLEEWSDWSPVKNISWIPDSQTKVFPQDKVILVGSDITFCCVSQEKVLSALIGHTNCPLIHLDGENVAIKIRNISVSASSGTNVVFTTEDNIFGTVIFAGYPPDTPQQLNCETHDLKEIICSWNPGRVTALVGPRATSYTLVESFSGKYVRLKRAEAPTNESYQLLFQMLPNQEIYNFTLNAHNPLGRSQSTILVNITEKVYPHTPTSFKVKDINSTAVKLSWHLPGNFAKINFLCEIEIKKSNSVQEQRNVTIKGVENSSYLVALDKLNPYTLYTFRIRCSTETFWKWSKWSNKKQHLTTEASPSKGPDTWREWSSDGKNLIIYWKPLPINEANGKILSYNVSCSSDEETQSLSEIPDPQHKAEIRLDKNDYIISVVAKNSVGSSPPSKIASMEIPNDDLKIEQVVGMGKGILLTWHYDPNMTCDYVIKWCNSSRSEPCLMDWRKVPSNSTETVIESDEFRPGIRYNFFLYGCRNQGYQLLRSMIGYIEELAPIVAPNFTVEDTSADSILVKWEDIPVEELRGFLRGYLFYFGKGERDTSKMRVLESGRSDIKVKNITDISQKTLRIADLQGKTSYHLVLRAYTDGGVGPEKSMYVVTKENSVGLIIAILIPVAVAVIVGVVTSILCYRKREWIKETFYPDIPNPENCKALQFQKSVCEGSSALKTLEMNPCTPNNVEVLETRSAFPKIEDTEIISPVAERPEDRSDAEPENHVVVSYCPPIIEEEIPNPAADEAGGTAQVIYIDVQSMYQPQAKPEEEQENDPVGGAGYKPQMHLPINSTVEDIAAEEDLDKTAGYRPQANVNTWNLVSPDSPRSIDSNSEIVSFGSPCSINSRQFLIPPKDEDSPKSNGGGWSFTNFFQNKPND

SEQ ID NO: 42 - DNA, 10553 bp, Homo sapiens
  source 1..10553: mol_type = other DNA
agtcccggctggagcgactcggccgtggcggtggccgttaccgttgcctctgggaggctctggcggcggcggcggcccgcggggttcgcggagcgcagcgggccgcccttcgcccgtggccgcctcaagcagcctcgcgccgacacaggggaggcgagacggcggctgcggaggcggcggcgcattgtgcccggccccctccttggcggctcctgcccccgggcggctgtgggatctgggcagccccggggcggcggccgaggctacagagccggcggcaggggatggcaagatagcggcgcgggagcgtaccgactgactgcattgcacagatgatggatatttacgtatgtttgaaacgaccatcctggatggtggacaataaaagaatgaggactgcttcaaatttccagtggctgttatcaacatttattcttctatatctaatgaatcaagtaaatagccagaaaaagggggctcctcatgatttgaagtgtgtaactaacaatttgcaagtgtggaactgttcttggaaagcaccctctggaacaggccgtggtactgattatgaagtttgcattgaaaacaggtcccgttcttgttatcagttggagaaaaccagtattaaaattccagctctttcacatggtgattatgaaataacaataaattctctacatgattttggaagttctacaagtaaattcacactaaatgaacaaaacgtttccttaattccagatactccagagatcttgaatttgtctgctgatttctcaacctctacattatacctaaagtggaacgacaggggttcagtttttccacaccgctcaaatgttatctgggaaattaaagttctacgtaaagagagtatggagctcgtaaaattagtgacccacaacacaactctgaatggcaaagatacacttcatcactggagttgggcctcagatatgcccttggaatgtgccattcattttgtggaaattagatgctacattgacaatcttcatttttctggtctcgaagagtggagtgactggagccctgtgaagaacatttcttggatacctgattctcagactaaggtttttcctcaagataaagtgatacttgtaggctcagacataacattttgttgtgtgagtcaagaaaaagtgttatcagcactgattggccatacaaactgccccttgatccatcttgatggggaaaatgttgcaatcaagattcgtaatatttctgtttctgcaagtagtggaacaaatgtagtttttacaaccgaagataacatatttggaaccgttatttttgctggatatccaccagatactcctcaacaactgaattgtgagacacatgatttaaaagaaattatatgtagttggaatccaggaagggtgacagcgttggtgggcccacgtgctacaagctacactttagttgaaagtttttcaggaaaatatgttagacttaaaagagctgaagcacctacaaacgaaagctatcaattattatttcaaatgcttccaaatcaagaaatatataattttactttgaatgctcacaatccgctgggtcgatcacaatcaacaattttagttaatataactgaaaaagtttatccccatactcctacttcattcaaagtgaaggatattaattcaacagctgttaaactttcttggcatttaccaggcaactttgcaaagattaattttttatgtgaaattgaaattaagaaatctaattcagtacaagagcagcggaatgtcacaatcaaaggagtagaaaattcaagttatcttgttgctctggacaagttaaatccatacactctatatacttttcggattcgttgttctactgaaactttctggaaatggagcaaatggagcaataaaaaacaacatttaacaacagaagccagtccttcaaaggggcctgatacttggagagagtggagttctgatggaaaaaatttaataatctattggaagcctttacccattaatgaagctaatggaaaaatactttcctacaatgtatcgtgttcatcagatgaggaaacacagtccctttctgaaatccctgatcctcagcacaaagcagagatacgacttgataagaatgactacatcatcagcgtagtggctaaaaattctgtgggctcatcaccaccttccaaaatagcgagtatggaaattccaaatgatgatctcaaaatagaacaagttgttgggatgggaaaggggattctcctcacctggcattacgaccccaacatgacttgcgactacgtcattaagtggtgtaactcgtctcggtcggaaccatgccttatggactggagaaaagttccctcaaacagcactgaaactgtaatagaatctgatgagtttcgaccaggtataagatataattttttcctgtatggatgcagaaatcaaggatatcaattattacgctccatgattggatatatagaagaattggctcccattgttgcaccaaattttactgttgaggatacttctgcagattcgatattagtaaaatgggaagacattcctgtggaagaacttagaggctttttaagaggatatttgttttactttggaaaaggagaaagagacacatctaagatgagggttttagaatcaggtcgttctgacataaaagttaagaatattactgacatatcccagaagacactgagaattgctgatcttcaaggtaaaacaagttaccacctggtcttgcgagcctatacagatggtggagtgggcccggagaagagtatgtatgtggtgacaaaggaaaattctgtgggattaattattgccattctcatcccagtggcagtggctgtcattgttggagtggtgacaagtatcctttgctatcggaaacgagaatggattaaagaaaccttctaccctgatattccaaatccagaaaactgtaaagcattacagtttcaaaagagtgtctgtgagggaagcagtgctcttaaaacattggaaatgaatccttgtaccccaaataatgttgaggttctggaaactcgatcagcatttcctaaaatagaagatacagaaataatttccccagtagctgagcgtcctgaagatcgctctgatgcagagcctgaaaaccatgtggttgtgtcctattgtccacccatcattgaggaagaaataccaaacccagccgcagatgaagctggagggactgcacaggttatttacattgatgttcagtcgatgtatcagcctcaagcaaaaccagaagaagaacaagaaaatgaccctgtaggaggggcaggctataagccacagatgcacctccccattaattctactgtggaagatatagctgcagaagaggacttagataaaactgcgggttacagacctcaggccaatgtaaatacatggaatttagtgtctccagactctcctagatccatagacagcaacagtgagattgtctcatttggaagtccatgctccattaattcccgacaatttttgattcctcctaaagatgaagactctcctaaatctaatggaggagggtggtcctttacaaacttttttcagaacaaaccaaacgattaacagtgtcaccgtgtcacttcagtcagccatctcaataagctcttactgctagtgttgctacatcagcactgggcattcttggagggatcctgtgaagtattgttaggaggtgaacttcactacatgttaagttacactgaaagtgttcatgtgcttttaatgtagtctaaaagccaaagtatagtgactcagaatcctcaatccacaaaactcaagattgggagctctttgtgatcaagccaaagaattctcatgtactctaccttcaagaagcatttcaaggctaatacctacttgtacgtacatgtaaaacaaatcccgccgcaactgttttctgttctgttgtttgtggttttctcatgtgtatacttggtggaattgtaagtggatttgcaggccagggagaaaatgtccaagtaacaggtgaagtttatttgcctgacgtttactcctttctagatgaaaaccaagcacagattttaaaacttctaagattattctcctctatccacagcattcacaaaaattaatataatttttaatgtagtgacagcgatttagtgttttgtttgataaagtatgcttatttctgtgcctactgtataatggttatcaaacagttgtctcaggggtacaaactttgaaaacaagtgtgacactgaccagcccaaatcataatcatgttttcttgctgtgataggttttgcaagccttttcattattttttagcttttatgcttgcttccattatttcagttggttgccctaatatttaaaatttacacttctaagactagagacccacattttttaaaaatcattttattttgtgatacagtgacagctttatatgagcaaattcaatattattcataagcatgtaattccagtgacttactatgtgagatgactactaagcaatatctagcagcgttagctgtccatatagttctgattggatttcgttcctcctgaggagaccatgccgttgagcttggctacccaggcagtggtgatctttgacaccttctggtggatgttcctcccactcatgagtcttttcatcatgccacattatctgatccagtcctcacatttttaaatataaaactaaagagagaatgcttcttacaggaacagttacccaagggctgtttcttagtaactgtcataaactgatctgaatccatgggcatacctgtgttgcaggtgcagcaattgcttggtgagctgtgcagaattgattgccttcagcacagcatcctctgcccacccttgtttctcataagcgatgtctggagtgattgtggttcttggaaaagcagaaggaaaaactaaaaagtgtatcttgtattttccctgccctcaggttgcctatgtattttaccttttcatatttaaggcaaaagtacttgaaaattttaagtgtccgaataagatatgtcttttttgtttgttttttttggttgtttgtttgttttttatcatctgagattctgtaatgtatttgcaaataatggatcaattaattttttttgaagctcatattgtatctttttaaaaaccatgttgtggaaaaaagccagagtgacaagtgacaaaatctatttaggttctctgtgtatgaatcctgattttaactgctaggattcagctaaatttctgagctttatgatctgtggaaatttggaatgaaatgcaattcattttgtacatacatagtatattaaaactatataatagttcatagaaatgttcagtaatgaaaaatatatccaatcagagccatccctaaagagtgttctcttgtcttcctttgtatcctctttggctccttcccttagcttccaccccagacatcagacctggggctgccttctctccctgccaaagcttgctgttagcattgtctgcttgccctcaactcctgccttgttccctgttgaaatgtatcaatcccgtactttatctctccaggacaaggataagtgtggctacagtaaaagtttattgctctaaacggcgctaacctgagataatgagaaaaggccagaagagattgtttgatctctgtctgtcaatatatatgcatttcaactgtgaccatctggatccagggccctttctaacctatataacgactcatttgtttggttaatgatgaatatcactggggctcttaagtcctttcgttctatccaagacttcattgtttttttctgtatgaaaaaagtgcagaatatcactcacctttcccctacttttggatcccctacacgaggatcactagcttaatgagaagcagagtaacgctattaagtctgggcaagctccttataagttgctgtgtgcttaaaagaatgtgatttatgtctggggccaaagcagttttccttcttttccctcattgaattcaagacagctagacccttgtgtagatcccaggatattacctctactccccccaacctgtgtgtgtagggagagtaacaacacgggaagaggggagggaagttggaaggagattggtcacatgttcagttgtctgagatactggtaaatgtgcgctgtttgtcaatgaaggttgcatgcctgcatttacaaggtggtctcatactgattgtgctctgtccagttagattcgtggcttctcccttggaagctacaattaaggactagttagaagcagaggctagatgtgttctctccagcccttactaactgggaaaataattgagaaatccctcttttcctcagtgaaagcccagtcattggttagaaaaatctaattgtcaaactagcattatgttccatcatatctgtgggatagtaattcatgtaagacacatttttacctctcttacaagtcaattcacttacaagccagtttcaaatcaagcttcccttgcgaggaatggagatcattatggggcttattatgactacatttcttttatgagtgaccattttaaataattaatattttatttaatattaaattattaaagacttagctagacttttaacattagatgaaccttgtgaatcatatattgcatagattagcacatgtatgcaatctaggtcatcaatttgttgaatttatacagccctagatttgagattgtggccctgagtatctggatagttgagttgtgtgtttatgtgcttatatgatagaggtgctttgttcctgcagcttagaaacagaagcagccattcactgagaagcttaagagaggaagtatcaacctcattttccaaaccagcattactttcaccgctcgtggatctgaaagattacatttagaacatttagtactattacactctcagaaactgtggtaaaaagtcacattttcaaaacttcatgcatattgtattcttgttggaaataagtcctatagtttcttaattgtcttcatgccgtccatatttaacaaacattgcaagtcctttttatatttgggtaattatttgtaatttagtgaaggagactaggggatgttttcttccaaagggaatttaaaatcaattttatggtattttgaaagtaaaatactccttaacgtgtcaatatttttaaaatgttatctcgaagttttctattgctcaggtatataatctaataaaattttttgtttgctctaaggttatttttgctattctctattttgaattatgttaaaatttgtgtgcattttatgaaatgccttttttcttattttgaaagtgtaaaattgggcatctcagagtaaaatgtgggattattagctacaaagactaggcacatcgtgaaagctcagtaactaattttcttgactgagtcctatcccagagtgtcacagattcaacagaattttcctgaagggtgatacacaccaaaatctagcttgtgtggatctgagactattgactcaaagattcaaatctacttcggaagtgactccacggtttgagtgaaaactgaggaaggactcatgcctgtatatcactagatatcttatttctccataattttaagtgttcataatttcttcttctttgatgggtgtgcaactggggcatgtttgtaccagccagcatgtgttctgcccaacagtgtgtccgtgtgtgaggttaactgattcagaactcattctcttgataaactatttcttgaaagcatttattttaagtctttatttcctgctgaaatgaagtttcatgctgtcatgcccatcttatttattctagaagaaaattttcatagaagaaaatgatttatggccaaagttacagaacattcatcttttagacttagccttagaatatcattggaaattacttggcttgaatttggttcgtttttatctttatggattatgtaccagggctattaataatacttaaaccccttattttgctatggtggttagatttttttattccttttcaattagtgctattaattattacatggtcgtattcatgcttattacagatgaactatttttagtgccagtgtaaaggattaagaataacattcaattagttggctatttcaggctttattgtacatggtaatgtttcagggagtgtgatttggtctagaatatatccagatccttgtaattatgatattgggttatgacaggattctattatttttagctatgaatggtgcttatttttccctatattaggaatgttaatatttggattatcagagtccatgttataaacagaatttacctatgcaagacaaattctaactgtgcaacattttcatgagaattaaaagttgtgtgttaaggggaaaaccctctgaatgtttttatgtgtaagtgcctaaagaaccgtagaaacagtacatcaaaagctcttataaaagaaaaactgattgaacattagccagaaacaaaatatgatttacatttttttttttggttgctgggactgaataccctaaaaactaagagatgtgagtggggaaaatgtctaattgataagaaagttgatttatattatatttacatgcatcttctaagattgcctttacagtagccaatcagaactttaaaaaaaaaaaagctaacaacatagatcctatgtgttgcccttaagactaaaatactttgcacacgtgattgaatggctcacttaagttgttgaatttccttatacatttaaagtgtacttccgttaagaattattccattttaaatgggtaactttcagcttccgaactattttcctaaacattccagttgtgtattataaaagatcaaaatatctctaggtggtagtacaattttcatttataacgtggaaaagttaactgttaggtttaacattagtattagtgtttttgcaattgctcatagaaaagaacactgaataatggttttcatacaatttttgtaaaacattcttctcccagtttgattccaaatgcttttccccaaattgtctaatatatcataagctagtgtttccttgtatttaatttttccttccaacacaatatttaggaaaaatatgaataacattgtgagtagcgggagacaacacgaaaaagaaacctttcattgttgtggaggggtaggtgttatgtgattgatgcccttcctggcgtttgttttatcctgttattttctcaaaaaagagcacggctttttcttaaatacatttaaattcagaattgcttgcaaaagattggcctggatagatagacatcctagatttaagatagtaccatcttaaaagtatgttgaaaggtaaaataaatcatttcaaaatacttaactttcctaataaggatgttaggttttcttctctttcattagctggccataagtcaaggtccttataacactaggaaattacctttttttactttcaaaattgcattatagtgaattactgtttacaaaatacacatactgtgaacagatataagtttctgtcttttataaggtttgtagaatgaatgtttttttaaagtgagtattatatgttaaatattttaagttttttataaatactagtaactgtttactaatttttgtttggtcaaatgcttgtaaatgtagctgaaagaagatagggagaaactgcggatcccaaactgttccctttttcatttcttgaaatgttaccactacagacatttttttaaggtgaataaacagttgtgatgtgctgtacctaaaatcatgtttaatcgtataaggaaacatttcaatacacttatacaggaagaaaactatagatgaagtacatgtgtgtgattcagtctgattcacagaattctgagagtaatatggaataaaacaactccacttagatgataactgaagcatttcctgccttgtgaaaatttggattttaaattgctgttagaatgggaaatttggacactttatatcattgtataatttcagaatttagtttctgtatcttttggaaaacatgattatagcaaaaacatagaaaataatctattactaaaacaccataaatgtaaaactagtatgcttggctgttaactctaaagatgttacttatgtctgtttttaaaacatgcatgtatttaacaattttatcatagtattgtcatggaaaaaataaatatattttcttacatcttacactgacagacttgggcattattgggtttttccccatgttacacacttaggagaagtggctctgctttgttgttgtatttttttgttctatcccgtaagaaatacagtggttgtaaagcaatcacatagcgctatggatgtatttttaacatttgagtacattgctgtgccattggtgtaacatccatctgtccattaagtcattattgtttacctgagaagttagcatcaaaataatcaaatagtgggaatccaacattagcaaataaataataaatactggtctttaaagtaa

SEQ ID NO: 43 - protein, 509 aa, Homo sapiens
MGCGCSSHPEDDWMENIDVCENCHYPIVPLDGKGTLLIRNGSEVRDPLVTYEGSNPPASPLQDNLVIALHSYEPSHDGDLGFEKGEQLRILEQSGEWWKAQSLTTGQEGFIPFNFVAKANSLEPEPWFFKNLSRKDAERQLLAPGNTHGSFLIRESESTAGSFSLSVRDFDQNQGEVVKHYKIRNLDNGGFYISPRITFPGLHELVRHYTNASDGLCTRLSRPCQTQKPQKPWWEDEWEVPRETLKLVERLGAGQFGEVWMGYYNGHTKVAVKSLKQGSMSPDAFLAEANLMKQLQHQRLVRLYAVVTQEPIYIITEYMENGSLVDFLKTPSGIKLTINKLLDMAAQIAEGMAFIEERNYIHRDLRAANILVSDTLSCKIADFGLARLIEDNEYTAREGAKFPIKWTAPEAINYGTFTIKSDVWSFGILLTEIVTHGRIPYPGMTNPEVIQNLERGYRMVRPDNCPEELYQLMRLCWKERPEDRPTFDYLRSVLEDFFTATEGQYQPQP

SEQ ID NO: 44 - DNA, 2090 bp, Homo sapiens
  source 1..2090: mol_type = other DNA
acttgtagcctgagggctcagagggagcaccggtttggagctgggaccccctattttagcttttctgtggctggtgaatggggatcccaggatctcacaatctcagggaccatgggctgtggctgcagctcacacccggaagatgactggatggaaaacatcgatgtgtgtgagaactgccattatcccatagtcccactggatggcaagggcacgctgctcatccgaaatggctctgaggtgcgggacccactggttacctacgaaggctccaatccgccggcttccccactgcaagacaacctggttatcgctctgcacagctatgagccctctcacgacggagatctgggctttgagaagggggaacagctccgcatcctggagcagagcggcgagtggtggaaggcgcagtccctgaccacgggccaggaaggcttcatccccttcaattttgtggccaaagcgaacagcctggagcccgaaccctggttcttcaagaacctgagccgcaaggacgcggagcggcagctcctggcgcccgggaacactcacggctccttcctcatccgggagagcgagagcaccgcgggatcgttttcactgtcggtccgggacttcgaccagaaccagggagaggtggtgaaacattacaagatccgtaatctggacaacggtggcttctacatctcccctcgaatcacttttcccggcctgcatgaactggtccgccattacaccaatgcttcagatgggctgtgcacacggttgagccgcccctgccagacccagaagccccagaagccgtggtgggaggacgagtgggaggttcccagggagacgctgaagctggtggagcggctgggggctggacagttcggggaggtgtggatggggtactacaacgggcacacgaaggtggcggtgaagagcctgaagcagggcagcatgtccccggacgccttcctggccgaggccaacctcatgaagcagctgcaacaccagcggctggttcggctctacgctgtggtcacccaggagcccatctacatcatcactgaatacatggagaatgggagtctagtggattttctcaagaccccttcaggcatcaagttgaccatcaacaaactcctggacatggcagcccaaattgcagaaggcatggcattcattgaagagcggaattatattcatcgtgaccttcgggctgccaacattctggtgtctgacaccctgagctgcaagattgcagactttggcctagcacgcctcattgaggacaacgagtacacagccagggagggggccaagtttcccattaagtggacagcgccagaagccattaactacgggacattcaccatcaagtcagatgtgtggtcttttgggatcctgctgacggaaattgtcacccacggccgcatcccttacccagggatgaccaacccggaggtgattcagaacctggagcgaggctaccgcatggtgcgccctgacaactgtccagaggagctgtaccaactcatgaggctgtgctggaaggagcgcccagaggaccggcccacctttgactacctgcgcagtgtgctggaggacttcttcacggccacagagggccagtaccagcctcagccttgagaggccttgagaggccctggggttctccccctttctctccagcctgacttggggagatggagttcttgtgccatagtcacatggcctatgcacatatggactctgcacatgaatcccacccacatgtgacacatatgcaccttgtgtctgtacacgtgtcctgtagttgcgtggactctgcacatgtcttgtacatgtgtagcctgtgcatgtatgtcttggacactgtacaaggtacccctttctggctctcccatttcctgagaccacagagagaggggagaagcctgggattgacagaagcttctgcccacctacttttctttcctcagatcatccagaagttcctcaagggccaggactttatctaatacctctgtgtgctcctccttggtgcctggcctggcacacatcaggagttcaataaatgtctgttgatgactgttgta

SEQ ID NO: 45 - protein, 512 aa, Homo sapiens
MGCIKSKGKDSLSDDGVDLKTQPVRNTERTIYVRDPTSNKQQRPVPESQLLPGQRFQTKDPEEQGDIVVALYPYDGIHPDDLSFKKGEKMKVLEEHGEWWKAKSLLTKKEGFIPSNYVAKLNTLETEEWFFKDITRKDAERQLLAPGNSAGAFLIRESETLKGSFSLSVRDFDPVHGDVIKHYKIRSLDNGGYYISPRITFPCISDMIKHYQKQADGLCRRLEKACISPKPQKPWDKDAWEIPRESIKLVKRLGAGQFGEVWMGYYNNSTKVAVKTLKPGTMSVQAFLEEANLMKTLQHDKLVRLYAVVTREEPIYIITEYMAKGSLLDFLKSDEGGKVLLPKLIDFSAQIAEGMAYIERKNYIHRDLRAANVLVSESLMCKIADFGLARVIEDNEYTAREGAKFPIKWTAPEAINFGCFTIKSDVWSFGILLYEIVTYGKIPYPGRTNADVMTALSQGYRMPRVENCPDELYDIMKMCWKEKAEERPTFDYLQSVLDDFYTATEGQYQQQP

SEQ ID NO: 46 - DNA, 5872 bp, Homo sapiens
  source 1..5872: mol_type = other DNA
agttcctctcccgccgcgccgggccgcgctgccgctcgctccccggccgtggcgcctccgggccagacgcgctgcagcctccagcccgcggcaagcggggcggccgcgccacccccggccccgcgccagcagcccctcgccgcgcgtccagcgttcccggccagcagcctccccatacgcaggtcctgctgggccgccccgtcgcgccccccactctgaactcaagtcaccgtggagctccgccgccccgaaactttcaccgcgagcgggaaatatgggatgtataaaatcaaaagggaaagacagcttgagtgacgatggagtagatttgaagactcaaccagtacgtaatactgaaagaactatttatgtgagagatccaacgtccaataaacagcaaaggccagttccagaatctcagcttttacctggacagaggtttcaaactaaagatccagaggaacaaggagacattgtggtagccttgtacccctatgatggcatccacccggacgacttgtctttcaagaaaggagagaagatgaaagtcctggaggagcatggagaatggtggaaagcaaagtcccttttaacaaaaaaagaaggcttcatccccagcaactatgtggccaaactcaacaccttagaaacagaagagtggtttttcaaggatataaccaggaaggacgcagaaaggcagcttttggcaccaggaaatagcgctggagctttccttattagagaaagtgaaacattaaaaggaagcttctctctgtctgtcagagactttgaccctgtgcatggtgatgttattaagcactacaaaattagaagtctggataatgggggctattacatctctccacgaatcacttttccctgtatcagcgacatgattaaacattaccaaaagcaggcagatggcttgtgcagaagattggagaaggcttgtattagtcccaagccacagaagccatgggataaagatgcctgggagatcccccgggagtccatcaagttggtgaaaaggcttggcgctgggcagtttggggaagtctggatgggttactataacaacagtaccaaggtggctgtgaaaaccctgaagccaggaactatgtctgtgcaagccttcctggaagaagccaacctcatgaagaccctgcagcatgacaagctcgtgaggctctacgctgtggtcaccagggaggagcccatttacatcatcaccgagtacatggccaagggcagtttgctggatttcctgaagagcgatgaaggtggcaaagtgctgcttccaaagctcattgacttttctgctcagattgcagagggaatggcatacatcgagcggaagaactacattcaccgggacctgcgagcagctaatgttctggtctccgagtcactcatgtgcaaaattgcagattttggccttgctagagtaattgaagataatgagtacacagcaagggaaggtgctaagttccctattaagtggacggctccagaagcaatcaactttggatgtttcactattaagtctgatgtgtggtcctttggaatcctcctatacgaaattgtcacctatgggaaaattccctacccagggagaactaatgccgacgtgatgaccgccctgtcccagggctacaggatgccccgtgtggagaactgcccagatgagctctatgacattatgaaaatgtgctggaaagaaaaggcagaagagagaccaacgtttgactacttacagagcgtcctggatgatttctacacagccacggaagggcaataccagcagcagccttagagcacagggagacccgtccatttggcaggggtggctgcctcatttagagaggaaaagtaaccatcactggttgcacttatgatttcatgtgcggggatcatctgccgtgcctggatcctgaaatagaggctaaattactcaggaagaacaccctctaaatgggaaagtattctgtactcttagatggattctccactcagttgcaacttggacttgtcctcagcagctggtaatcttgctctgcttgacaacatctgagtgcagccgtttgagaagaaaacatctattctctccaaaaatgcacccaactagctctatgtttacaaatggacataggactcaaagtttcagagaccattgcaatgaatccccaataattgcagaactaaactcatttataaagctaaaataaccggatatatacatagcatgacatttctttgtgctttggcttacttgtttaaaaaaaaaaaaaaactaatccaacctgttagattttgcaggtgaagtcagcagcttaaaaatgtctttcccagatttcaatgatttttttccccctacctcccaaaatctgagactgttaaaacatttttcttctatgaacactgctcagacctgctagacatgccataggagtggcgtgcacatctctctctcttccagcaggaggagcccgtgagcacgcacagctgccctgtctgctcacccgaaggcaccgggctcacctggacctcccaggaaagggagaagagcctcagaaactgctctgtgtttagaaggaatatttttaagagtccagctttttcatttccacaatttcctatatccagatttgttttgacaatgtagtttggaagaactaagattctaatctctgaagaaccttatagggccttctaaaacataagagtttcctttgttgcttcaaatatttgaacattatgttaaagatcaagtattaattttagttgtactctagaaagctaaagtgccacattcggggctatttttatgattcagcaatcttttctaaattgtgtagcatgtgtatgagactatttatacccaaggatatgaaggaacataagtgactacaaggctctaataagccacggtggcaggaggttcaagcggttctgttcactaaatttttctcctgtaagctttgaatggaaacttctgtatcacatgatgtgtttcacttatgctgttgtgtatatacctaatatttctatttttgattttattttaatacacctcgtccaataacatctcaagctttttatttgcatttacattttcagctgtggtcagtgtaaaaattggtcatcagctgggggcggggtggttagaagtgattcaacagagctacatgctttaaacttgcccaagttctacctccttcctttgaacatttcagattggagaaccaaggagttgattgcctgaacacctgaacatccgtttatgggggccagatagaatttgttttcaaataggcttaacaggcatcattaaaatttcattctgtgtgttttgtttaggcttgaggtgcttagaagatgggataaaatattctacttttttctaaattttaactttgtttcctatgtgatttttttaaatgtcctttctaaaatattctaaaattattgattcacaagtgccatgttcagaactatagaatattactgttacataatgtctgcacagctggtcccttgattcagtggtaaggtttttgtgtacacccccctgcttgcattttatttcagaaccacaagtattacccaatatgttacatggagaggaactataaagaatccctaaggcaaaaagaagtctctagaaaatgactagaggttttttttttagcataacaaatttatttaaagaaaattattaaatttatcttcgccttgttttgcttctcccagttcctcctcttcttgccattttccacttgtctttccctcccaatcaagcctgtgatccttacctccatgtgggcccttcaccagcttgggcctcatctctggtgtccagcatgtgtggaagtcacacgttcccttgatgaacagcacacacagtctccttacttagctataggtttccagcctccctgtgacagacaggcataatgaggggctgaataggtgtttgtagcattttcgggtatccagtggtgtgcaaaatggctcatgtcatcacacctcaggttattgtagagaactggaaagacagaatccatactccctaccgccaagattctgacttagctgttgtgcagcgggagatgtatgtcagtctattttaaaagcttctccagtcagctagacacagtggctcatgcctgtaatctcagcactttgggaggctaaggcaggaggatcgcttgagctcaggagttagacaccagcctgagcaatatagcaagtctctacaaaaaattttaaaaattagctaagtgtggtggcacatacctatggtcccagctactcaggaggctgaggtgggaggattgcttgagcccaggaagtcaaggctgcagtgagctatgatcgtgccactgcactccagcctgggcaagagtgagaccctgtctcaaaaaaaaaaaccaaaaaaacaaaaaaacccttccctggtgaatataatgtatgctcagtcttgagagtcaccatttggtttgacccatattacaaagcccagccttctttttcctcagatggtttcatttctcaaaggggagtggaagagaaggaaggaggaaaaaaacgtgccttccttcctggtgaacatgaagctcactgaacctaaaggagactcacaggctagaaaccagtgtccttagtagtaggggccacctggggcttccgtggcttctccaggcatacctcctgaggttccacagaatccccttgcagaaagtacttctgatgagccactgggaacgtgtactgtccaagcccccttctaggggaaattcactgccacagaagccagcagccctggctgtcccaagggtgcataaaaggataataactaaaaggagggaattaattttgttgcctacaccagggatagatcgagggcactgaaagcatcataagtataaactcatctccacgtcagcttgtggagtctgctttctcgctctctcttttttttttttttttgacagagtctcactctgtcacgcaggctagagttgcagtggtgcgatctcagctcattgcaacctccccctctctggttggagcgattcttctcctgcctcagcctccctagtagctggaactacaggcacacaccatctcgcctggctaatttttgtatttttagtagagatggggtttcaccatgttagccaggctggtctcgaactcctgacctcaggcgatccgcctgcctcggcttcccaaagtgctgggattacaagtgtgagccactgtgcccggtcggggtctgctttctctttattccccgtcctctcacaaactacatccaggggcggtagctgctaaaaggactcaattctgcaacctcagcttctgacaccttcaaataaattaaatgctggtcctagggctcgctccccagctcttctgatgtcactgccaggttccacagccagttgtcggacatctcctgcttcctcagccaagaacacctctcagatgagatcaaaccgcccagctttcctcttagcatcttcctttattttccacttctggctggtggaagagagatcgtagttctctattccctacattttaactccacgaatattttagattaagtgaagtcttgctgttcttcctgatggaaatggtaattataaacatacaaagatacccatacacacattctttactcagggccctcttgtgctttggcaaatgataaaaattatctctaactcacacaacgaccctggaagatctggacaatgctatcactatttcacagctgagagatcgggagcatttaaagccacagaaggaatagattggcttcgcttcatattgtttccttgtgaaataaaaccagtgaaacacc

SEQ ID NO: 47 - protein, 178 aa, Homo sapiens
MAAGTAAALAFLSQESRTRAGGVGGLRVPAPVTMDSFFFGCELSGHTRSFTFKVEEEDDAEHVLALTMLCLTEGAKDECNVVEVVARNHDHQEIAVPVANLKLSCQPMLSLDDFQLQPPVTFRLKSGSGPVRITGRHQIVTMSNDVSEEESEEEEEDSDEEEVELCPILPAKKQGGRP

SEQ ID NO: 48 - DNA, 910 bp, Homo sapiens
  source 1..910: mol_type = other DNA
gagggtccccggctttgtgcgtgtcgggggcggagtttgaagaaggctcttacagcatggccgccggtactgcagctgccttagcgtttttgagtcaggagagccgaacgcgggccgggggtgtcgggggcctacgggtcccggccccggtcactatggacagttttttcttcggctgtgagctctccggccacacccgctccttcacctttaaggtagaggaagaggatgatgcggagcacgtgctggcactaaccatgctctgcctcaccgagggagccaaagacgagtgtaatgtggtagaagttgtggcccggaaccatgaccatcaggagatcgcagtccctgtggccaacctcaagctgtcctgccaacccatgctcagtctggatgacttccagctccaaccacctgtaaccttccgcctgaagtcgggctctggccctgtgcggatcactgggcggcaccagattgttacgatgagcaatgatgtttctgaggaggagagcgaggaagaggaagaggacagtgatgaggaagaagttgagctgtgccccatccttcctgccaaaaagcaggggggcaggccctagccctcctaggtcagctccatgtgccatgcaccgccatgcaccctgttccctgacaagtttcaacaattgtaaatatttcttccttgaagaggagagcttgggtgggggttgggtgggagggacttgggtctttggtgctaggagagggcctgtgctccacacagccgtggttttctgattttcaccatgcccggggcctcccttcccacctgcctgtgagaattggaggttagtgcctgaagctcagagctacacatttttaatagtttttacatttttggataaaggttgaaataaagtggtgtggagtttttgca

SEQ ID NO: 49 - protein, 274 aa, Homo sapiens
MVGRRALIVLAHSERTSFNYAMKEAAAAALKKKGWEVVESDLYAMNFNPIISRKDITGKLKDPANFQYPAESVLAYKEGHLSPDIVAEQKKLEAADLVIFQFPLQWFGVPAILKGWFERVFIGEFAYTYAAMYDKGPFRSKKAVLSITTGGSGSMYSLQGIHGDMNVILWPIQSGILHFCGFQVLEPQLTYSIGHTPADARIQILEGWKKRLENIWDETPLYFAPSSLFDLNFQAGFLMKKEVQDEEKNKKFGLSVGHHLGKSIPTDNQIKARK

SEQ ID NO: 50 - DNA, 2521 bp, Homo sapiens
  source 1..2521: mol_type = other DNA
acacgcgactcccacaaggttgcagccggagccgcccagctcaccgagagcctagttccggccagggtcgccccggcaaccacgagcccagccaatcagcgccccggactgcaccagagccatggtcggcagaagagcactgatcgtactggctcactcagagaggacgtccttcaactatgccatgaaggaggctgctgcagcggctttgaagaagaaaggatgggaggtggtggagtcggacctctatgccatgaacttcaatcccatcatttccagaaaggacatcacaggtaaactgaaggaccctgcgaactttcagtatcctgccgagtctgttctggcttataaagaaggccatctgagcccagatattgtggctgaacaaaagaagctggaagccgcagaccttgtgatattccagttccccctgcagtggtttggagtccctgccattctgaaaggctggtttgagcgagtgttcataggagagtttgcttacacttacgctgccatgtatgacaaaggacccttccggagtaagaaggcagtgctttccatcaccactggtggcagtggctccatgtactctctgcaagggatccacggggacatgaatgtcattctctggccaattcagagtggcattctgcatttctgtggcttccaagtcttagaacctcaactgacatatagcattgggcacactccagcagacgcccgaattcaaatcctggaaggatggaagaaacgcctggagaatatttgggatgagacaccactgtattttgctccaagcagcctctttgacctaaacttccaggcaggattcttaatgaaaaaagaggtacaggatgaggagaaaaacaagaaatttggcctttctgtgggccatcacttgggcaagtccatcccaactgacaaccagatcaaagctagaaaatgagattccttagcctggatttccttctaacatgttatcaaatctgggtatctttccaggcttccctgacttgctttagtttttaagatttgtgtttttctttttccacaaggaataaatgagagggaatcgactgtattcgtgcatttttggatcatttttaactgattcttatgattactatcatggcatataaccaaaatccgactgggctcaagaggccacttagggaaagatgtagaaagatgctagaaaaatgttctttaaaggcatctacacaatttaattcctctttttagggctaaagttttagggtacagtttggctaggtatcattcaactctccaatgttctattaatcacctctctgtagtttatggcagaagggaattgctcagagaaggaaaagactgaatctacctgccctaagggacttaacttgtttggtagttagccatctaatgcttgtttatgatatttcttgctttcaattacaaagcagttactaatatgcctagcacaagtaccactcttggtcagcttttgttgtttatatacagtacacagataccttgaaaggaagagctaataaatctcttctttgctgcagtcatctactttttttttaattaaaaaaaatttttttttgaagcagtcttgctctgttacccaggctggagtgcagtggtgtgatctcggctcactgcaacctctgcctcccaggttccagcaattctcctgcctcagcctccctagtagctgggatgacaggcgcctgccatcatgcctgactaatttttgtatttttagtagagacggcgtttcaccatgttggccaggctggtctcaaactcctgacctcaggtgatccgcctacctcagcctcccaaagtgctgggattacaggcgtgatccaccacacctggcccttgcaatcttctactttaaggtttgcagagataaaccaataaatccacaccgtacatctgcaatatgaattcaagaaaggaaatagtaccttcaatacttaaaaatagtcttccacaaaaaatactttatttctgatctatacaaattttcagaaggttattttctttatcattgctaaactgatgacttactatgggatggggtccagtcccatgaccttggggtacaattgtaaacctagagttttatcaactttggtgaacagttttggcataatagtcaatttctacttctggaagtcatctcattccactgttggtattatataattcaaggagaatatgataaaacactgccctcttgtggtgcattgaaagaagagatgagaaatgatgaaaaggttgcctgaaaaatgggagacagcctcttacttgccaagaaaatgaagggattggaccgagctggaaaacctcctttaccagatgctgactggcactggtggtttttgctctcgacagtatccacaatagctgacggctgggtgtttcagtttgaaaatattttgttgccttcatcttcactgcaattttgtgtaaatttctcaaagatctgaattaaataaataaaattcatttctacagacccaca

SEQ ID NO: 51 - protein, 793 aa, Homo sapiens
MPLPGGLWWLLCCRRGFTLLHRDYGDGELSGDGDEDEDEETFELRTPSPAGGGRGPLEVTLTQPVRSGPVSNRLQSWEETWSLIPEKGLPEDDPDIVVKGWLYREPRGGGARPWLPPRRAWFVLTRDSLDQFSSSGKGARRLGSLVLTSLCSVTGPERRRKETGLWSVTVSGRKHSVRLCSPRQAEAERWGVALREVIASKAPLETPTQLLLRDIQESCGDPEAVALIYLRNPILRHTSGALYAPLLPLPYGVSAPGPGYAPLREEAVRLFLALQALEGARRPGPLMQGVLQTCRDLPALRDELFLQLAKQTSGPAGPPGLPATQDPAALRYWQLLTCMSCTFRPGGAVRGHLLGHLERTEQALPDSELAEYARFIRKALGRTRGRELVPSLAEISALSQRQELLCTVHCPGAGACAVAIDSHTTAGEVARELVGRLGLARSRNAFALYEQRGAQERALAGGTLVADVLTRFENLAAEEAGLEDSPDSGWRLCLRLHGPLHPEGLSPDGHELPFLFEQAHALLLRGRPPPPDDTLRALAALRLQSLQRDFSPRVPLPRLDRLLPPPAPPREDPPRPTPRPPPSAALLAGALWSPGLAKRRAERARRGGAGRTAGSIAREGGGGAGTAAAVLGGWKRLRGMGRAEAMAAYLALAAQCPGFGAARYDVLELSTEPGRGAPQKLCLGLGAKAMSLSRPGETEPIHSVSYGHVAACQLMGPHTLALRVGESQLLLQSPQVEEIMQLVNAYLANPSPERPCSSSSPPCQDLPDTSPPSQRPGLDEPQGQSGCLGQLQD

SEQ ID NO: 52 - skipped

SEQ ID NO: 53 - protein, 403 aa, Homo sapiens [sequence omitted]

SEQ ID NO: 54 - DNA, 8515 bp, Homo sapiens
  source 1..8515: mol_type = other DNA
gttctctcctctcggaagctgcagccatgatggaagtttgagagttgagccgctgtgaggcgaggccgggctcaggcgagggagatgagagacggcggcggccgcggcccggagcccctctcagcgcctgtgagcagccgcgggggcagcgccctcggggagccggccggcctgcggcggcggcagcggcggcgtttctcgcctcctcttcgtcttttctaaccgtgcagcctcttcctcggcttctcctgaaagggaaggtggaagccgtgggctcgggcgggagccggctgaggcgcggcggcggcggcggcacctcccgctcctggagcgggggggagaagcggcggcggcggcggccgcggcggctgcagctccagggagggggtctgagtcgcctgtcaccatttccagggctgggaacgccggagagttggtctctccccttctactgcctccaacacggcggcggcggcggctggcacatccagggacccgggccggttttaaacctcccgtgcgccgccgccgcaccccccgtggcccgggctccggaggccgccggcggaggcagccgttcggaggattattcgtcttctccccattccgctgccgccgctgccaggcctctggctgctgaggagaagcaggcccagtcgctgcaaccatccagcagccgccgcagcagccattacccggctgcggtccagagccaagcggcggcagagcgaggggcatcagctaccgccaagtccagagccatttccatcctgcagaagaagccccgccaccagcagcttctgccatctctctcctcctttttcttcagccacaggctcccagacatgacagccatcatcaaagagatcgttagcagaaacaaaaggagatatcaagaggatggattcgacttagacttgacctatatttatccaaacattattgctatgggatttcctgcagaaagacttgaaggcgtatacaggaacaatattgatgatgtagtaaggtttttggattcaaagcataaaaaccattacaagatatacaatctttgtgctgaaagacattatgacaccgccaaatttaattgcagagttgcacaatatccttttgaagaccataacccaccacagctagaacttatcaaacccttttgtgaagatcttgaccaatggctaagtgaagatgacaatcatgttgcagcaattcactgtaaagctggaaagggacgaactggtgtaatgatatgtgcatatttattacatcggggcaaatttttaaaggcacaagaggccctagatttctatggggaagtaaggaccagagacaaaaagggagtaactattcccagtcagaggcgctatgtgtattattatagctacctgttaaagaatcatctggattatagaccagtggcactgttgtttcacaagatgatgtttgaaactattccaatgttcagtggcggaacttgcaatcctcagtttgtggtctgccagctaaaggtgaagatatattcctccaattcaggacccacacgacgggaagacaagttcatgtactttgagttccctcagccgttacctgtgtgtggtgatatcaaagtagagttcttccacaaacagaacaagatgctaaaaaaggacaaaatgtttcacttttgggtaaatacattcttcataccaggaccagaggaaacctcagaaaaagtagaaaatggaagtctatgtgatcaagaaatcgatagcatttgcagtatagagcgtgcagataatgacaaggaatatctagtacttactttaacaaaaaatgatcttgacaaagcaaataaagacaaagccaaccgatacttttctccaaattttaaggtgaagctgtacttcacaaaaacagtagaggagccgtcaaatccagaggctagcagttcaacttctgtaacaccagatgttagtgacaatgaacctgatcattatagatattctgacaccactgactctgatccagagaatgaaccttttgatgaagatcagcatacacaaattacaaaagtctgaatttttttttatcaagagggataaaacaccatgaaaataaacttgaataaactgaaaatggacctttttttttttaatggcaataggacattgtgtcagattaccagttataggaacaattctcttttcctgaccaatcttgttttaccctatacatccacagggttttgacacttgttgtccagttgaaaaaaggttgtgtagctgtgtcatgtatatacctttttgtgtcaaaaggacatttaaaattcaattaggattaataaagatggcactttcccgttttattccagttttataaaaagtggagacagactgatgtgtatacgtaggaattttttccttttgtgttctgtcaccaactgaagtggctaaagagctttgtgatatactggttcacatcctacccctttgcacttgtggcaacagataagtttgcagttggctaagagaggtttccgaagggttttgctacattctaatgcatgtattcgggttaggggaatggagggaatgctcagaaaggaaataattttatgctggactctggaccatataccatctccagctatttacacacacctttctttagcatgctacagttattaatctggacattcgaggaattggccgctgtcactgcttgttgtttgcgcatttttttttaaagcatattggtgctagaaaaggcagctaaaggaagtgaatctgtattggggtacaggaatgaaccttctgcaacatcttaagatccacaaatgaagggatataaaaataatgtcataggtaagaaacacagcaacaatgacttaaccatataaatgtggaggctatcaacaaagaatgggcttgaaacattataaaaattgacaatgatttattaaatatgttttctcaattgtaacgacttctccatctcctgtgtaatcaaggccagtgctaaaattcagatgctgttagtacctacatcagtcaacaacttacacttattttactagttttcaatcataatacctgctgtggatgcttcatgtgctgcctgcaagcttcttttttctcattaaatataaaatattttgtaatgctgcacagaaattttcaatttgagattctacagtaagcgttttttttctttgaagatttatgatgcacttattcaatagctgtcagccgttccacccttttgaccttacacattctattacaatgaattttgcagttttgcacattttttaaatgtcattaactgttagggaattttacttgaatactgaatacatataatgtttatattaaaaaggacatttgtgttaaaaaggaaattagagttgcagtaaactttcaatgctgcacacaaaaaaaagacatttgatttttcagtagaaattgtcctacatgtgctttattgatttgctattgaaagaatagggtttttttttttttttttttttttttttttaaatgtgcagtgttgaatcatttcttcatagtgctcccccgagttgggactagggcttcaatttcacttcttaaaaaaaatcatcatatatttgatatgcccagactgcatacgattttaagcggagtacaactactattgtaaagctaatgtgaagatattattaaaaaggtttttttttccagaaatttggtgtcttcaaattataccttcaccttgacatttgaatatccagccattttgtttcttaatggtataaaattccattttcaataacttattggtgctgaaattgttcactagctgtggtctgacctagttaatttacaaatacagattgaataggacctactagagcagcatttatagagtttgatggcaaatagattaggcagaacttcatctaaaatattcttagtaaataatgttgacacgttttccataccttgtcagtttcattcaacaatttttaaatttttaacaaagctcttaggatttacacatttatatttaaacattgatatatagagtattgattgattgctcataagttaaattggtaaagttagagacaactattctaacacctcaccattgaaatttatatgccaccttgtctttcataaaagctgaaaattgttacctaaaatgaaaatcaacttcatgttttgaagatagttataaatattgttctttgttacaatttcgggcaccgcatattaaaacgtaactttattgttccaatatgtaacatggagggccaggtcataaataatgacattataatgggcttttgcactgttattatttttcctttggaatgtgaaggtctgaatgagggttttgattttgaatgtttcaatgtttttgagaagccttgcttacattttatggtgtagtcattggaaatggaaaaatggcattatatatattatatatataaatatatattatacatactctccttactttatttcagttaccatccccatagaatttgacaagaattgctatgactgaaaggttttcgagtcctaattaaaactttatttatggcagtattcataattagcctgaaatgcattctgtaggtaatctctgagtttctggaatattttcttagactttttggatgtgcagcagcttacatgtctgaagttacttgaaggcatcacttttaagaaagcttacagttgggccctgtaccatcccaagtcctttgtagctcctcttgaacatgtttgccatacttttaaaagggtagttgaataaatagcatcaccattctttgctgtggcacaggttataaacttaagtggagtttaccggcagcatcaaatgtttcagctttaaaaaataaaagtagggtacaagtttaatgtttagttctagaaattttgtgcaatatgttcataacgatggctgtggttgccacaaagtgcctcgtttacctttaaatactgttaatgtgtcatgcatgcagatggaaggggtggaactgtgcactaaagtgggggctttaactgtagtatttggcagagttgccttctacctgccagttcaaaagttcaacctgttttcatatagaatatatatactaaaaaatttcagtctgttaaacagccttactctgattcagcctcttcagatactcttgtgctgtgcagcagtggctctgtgtgtaaatgctatgcactgaggatacacaaaaataccaatatgatgtgtacaggataatgcctcatcccaatcagatgtccatttgttattgtgtttgttaacaaccctttatctcttagtgttataaactccacttaaaactgattaaagtctcattcttgtcattgtgtgggtgttttattaaatgagagtttataattcaaattgcttaagtccattgaagttttaattaatgggcagccaaatgtgaatacaaagttttcagtttttttttttcctgctgtccttcaaagcctactgtttaaaaaaaaaaaaaaaaaaaaacatggcctgagagtagagtatctgtctactcatgtttaattaaggaaaaacacttatttttagggctttagtcatcacttcataaattgtataagcacattaaatagcgttctagtcctgaaaaagtccaagattcttagaaaattgtgcatatttttattatgacagatgtttgaagataattccccagaatggatttgatactttagatttcaattttgtggcttttgtctattattctgtactctgccatcagcatatggaaagcttcatttactcatcatgacttgtgccatataaaaattgatatttcggaatagtctaaaggactttttgtacttgaatttaatcatgttgtttctaatattcttaaaagcttgaagactaaagcatatcctttcaacaaagcatagtaaggtaataagaaagtgtagtttgtacaagtgttaaaaaaataaagtagacaatgttacagtgggacttattatttcaagtttacattttctccatgtaattttttaaaaagtaaatgaaaaaatgtgcaataatgtaaaatatgaagtgtatgtgtacacacattttatttttcggtatcttgggtatacgtatggttgaaaactatactggagtctaaaagtattctaatttataagaagacattttggtgatgtttgaaaaatagaaatgtgctagttttgtttttatatcatgtcctttgtacgttgtaatatgagctggcttggttcagtaaatgccatcaccatttccattgagaatttaaaactcaccagtgtttaatatgcaggcttccaaaggcttatgaaaaaaatcaagacccttaaatctagttaatttgctgctaacatgaaactctttggttcttttatttttgccagataattagacacacatctaaagcttagtcttaaatggcttaagtgtagctattgattagtgctgttgctagttcagaaagaaatgtttgtgaatggaaacaagaatattcagtccaaactgttgtaaggacagtacctgaaaaccaggaaacaggataatggaaaaagtcttttaaagatgaaatgttggagccaactttcttatagaattaattgtatgtggctatagaaagcctaatgattgttgcttatttttgagagcatattattcttttatgaccataatcttgctgtttttccatcttccaaaagatcttccttctaatatgtatatcagaatgtgggtagccagtcagacaaattcatattggttggtagctttaaaaagtttgtaatgtgaagacaggaaaggacaaaatagtttgctttggtggtagtactctggttgttaagctaggtattttgagactacttccccatcacaacaacaataaaataatcactcataatcctatcacctggagacatagccatcgttaatatgttagtgactatacaatcatgttttcttctgtatatccatgtatattctttaaaaatgaaatttatactgtacctgatctcaaagctttttagcttagtatatctgtcatgaatttgtaggatgttccattgcatcagaaaacggacagtgatttgattactttctaatgccacagatgcagattacatgtagttattgagaatcctttcgaattcagtggcttaatcatgaatgtctaaatattgttgacattaggatgatacatgtaaattaaagttacatttgtttagcatagacaagcttaacattgtagatgtttctcttcaaaaatcatcttaaacatttgcatttggaattgtgttaaatagaatgtgtgaaacactgtattagtaaacttcatcacctttctacttccttatagtttgaacttttcagtttttgtagttcccaaacagttgctcaatttagagcaaattaatttaacacctgccaaaaaaaggctgctgttggcttatcagttgtctttaaattcaaatgctcatgtgacttttatcacatcaaaaaatatttcattaatgattcacctttagctctgaaaattaccgcgtttagtaattatagtgggcttataaaaacatgcaactctttttgatagttatttgagaattttggtgaaaaatatttagctgagggcagtatagaacttataaaccaatatattgatatttttaaaacatttttacatataagtaaactgccatctttgagcataactacatttaaaaataaagctgcatatttttaaatcaagtgtttaacaagaatttatattttttattttttaaaattaaaaataatttatatttcctctgttgcatgaggattctcatctgtgcttataatggttagagattttatttgtgtggaatgaagtgaggcttgtagtcatggttctagtgtttcagtttgccaagtctgtttactgcagtgaaattcatcaaatgtttcagtgtggttttctgtagcctatcatttactggctatttttttatgtacacctttaggattttctgcctactctatccagttgtccaaatgatatcctacattttacaaatgccctttcagtttctattttctttttccattaaattgccctcatgtcctaatgtgcagtttgtaagtgtgtgtgtgtgtgtctgtgtgtgtgtgaatttgattttcaagagtgctagacttccaatttgagagattaaataatttaattcaggcaaacatttttcattggaatttcacagttcattgtaatgaaaatgttaatcctggatgacctttgacatacagtaatgaatcttggatattaatgaatttgttagtagcatcttgatgtgtgttttaatgagttattttcaaagttgtgcattaaaccaaagttggcatactggaagtgtttatatcaagttccatttggctactgatggacaaaaaatagaaatgccttcctatggagagtatttttcctttaaaaaattaaaaaggttaattattttgacta

SEQ ID NO: 55 - protein, 214 aa, Homo sapiens
MVGRLSLQDVPELVDAKKKGDGVLDSPDSGLPPSPSPSHWGLAAGGGGGERAAAPGTLEPDAAAATPAAPSPASLPLAPGCALRLCPLSFGEGVEFDPLPPKEVRYTSLVKYDSERHFIDDVQLPLGLAVASCSQTVTCVPNGTWRNYKAEVRFEPRHRPTRFLSTTIVYPKYPKAVYTTTLDYNCRKTLRRFLSSVELEAAELPGSDDLSDEC

SEQ ID NO: 56 - DNA, 3988 bp, Homo sapiens
  source 1..3988: mol_type = other DNA
gccggggcgggcagcggcgagacccgggcggcgcgcgggcggcggggcagggagggaggtagggcggccgggcgggcagcggccccggcccgcgtctgcgcccctcgctgtcccgcgaccccggcgcgggtgcctcgggcccccctcgcgcgccgccatggtgggccggctgagcctacaggatgtgcccgagctcgtggacgcgaagaagaagggcgacggcgtcctggacagcccggactcggggctgccccccagccccagccccagccactgggggctcgcggcgggcggaggcggcggagagcgcgcggcggcaccggggacgctggagcccgacgcggcggcggcgacccccgcggctccgagtccagcgtctctccccctggctcccggctgtgcgctgaggctttgtcccctgtcctttggcgaaggagtggagtttgaccccttaccaccaaaggaagtaaggtacacctccttggtcaagtacgactccgagaggcacttcatcgacgacgtgcagctgcccctgggcctggcggtggcctcctgcagccagacggtcacctgtgtccccaatggcacgtggcgcaactacaaggccgaggtgcgcttcgagccacgccacaggcccacccgcttcctcagtaccaccatcgtgtaccccaagtaccccaaggccgtctacaccaccaccctggattacaactgccgcaagacgctgaggaggtttctgtccagcgtggagctcgaagccgcggagctcccgggcagcgacgacctctctgatgaatgctgacccagcaggctgggctggggtcggaccggctctcccgctgtcctgcccccgactgccctggccaagctgggcgaccttacccttcacgtcattccagccccagaggagtctaacctagagatacctccaagcgcggccgggggaagagaaaaaaaagaaaaaatcactgcatctcataattattgagatctttgtgttgtaattttcaagctgtttttagagggaatatatgtcctggtttgctgctgtgttgtttccccaaagtctcaatcagatgaggcaacaaaaagaccaccagaattgcaggaaagcagcagcagtctgggatagggaggggggaggagagctctccctccgtggtcagtttgtcagaagaaaagcatggaaaaagtgagatttaagaaatctcagccacgggtgtcttcactgcacaaaagtggtgctaattcagtaaacagtgacacctgtgtgggttcaatctgtggagagttgagttccattcctttgtttttaaatttccacctccatttgtgtttcctattaacctaaactcttgtaattctctaaatcttttttcatgatataaaaaaaaaagaaaatcccaaaccacaatttaagatgccttttttttttaaaaaaaaaggttctccgtgttgccacctgctccgggaaggccaggccgatgggcggccaggtttgggagcagcggcttcggctccgattgcttcctgacggtcagttccaagcacaggctctgagaaacgcctcgaacccttggtatctggtgaccgtctccgcaggcttccgtgagtctccgataggtgttttgggcttttggaatactttcagaatactttcccattttttcataaggcaaaacggagtggacggcctttttttgagagaaacagcattctaagagtgtgcttggaaaacacactttttgggagtccacgtggggagtggacactcaggacaggaagcggtggccctaagacctgcggccacccggaggaggcagacgcaggcgatgacctggttcatcatgagaggagctagagttgactcagtcttaggatctcgatggcgtcagaattgcagagggtttctgccagtgccttaggtctaattcagaaagcaaggaaggctgggcacggtggctggcgcctgtagtctcagctacttggaaactgaggcaggaggatctcttgagcccaagaattcgagaccggtctggcaacatagtgagcctccatctctaaaaaaaagtggcaaagctgaggaaatctgtgcccccatcccccgacaccagacaagctaaggtgcattcagagtagggaacgatgtcaaaacctggccgccgtggtggcgcgcattcctctcacaccaccgtacggaggcaggtgacagtcaactgaaatgtccccaaggaccgtgtgaattcggctggcgtggcccagcagcggggtggaccagggtgcggtggcttcagacctgcctcccgccaccccgtcctcccctaaccccttcttgggacctcctgccaatccctgtggtgtttgagtaaagaaagtggctgatggttttacttttttcttccaatattggaaagaacaaactagatattccccttgaacacatccaaattatttccagtgcctgagggttaccgagcactgtaagctcagctcggctgtagctccgggtttctgccgatggcctccatctgcgccgaaagctgaactgagccccgcggtgccccggagccacagcagcaggtgcagcgacaatcgccgtcgtgcgcagtcgctggagtcctggagagccacgctgtcctctgcagacaacagcatcagtccgctgtgccccaatgcatcgacgccctgtggacggggcctgcagtccacccgtggtctgagcttgccgggctgaagctcggctgggacccagggaggggccaccctgggacccacagtctcctcagtcacgtgcagagcaaaaaatgcttcctgtgtttggaagagcaagtgacgcagcatttattgataaaaatggatttttctgtctgatttcatgctgtggtcgtttaagtggtcaatgtcttttttttttttttttttgacatggagtctcgctctgttgcccaggctgagtggaatggcgccaactcagctcactgcaaccttcacctcccaggctcaagcgactctcctgcctcagcctcctgagcagctgggattacaggtgcccaccaccacgcccagctaatttttgtatttttagtagagacggggtttcaccatgttggccaggctggtctcgaacacctgaccttgtgatccacccgcctcggcctcccaataatttgtaagttatgttagcgggatcctcaaggccttgctttgccccgtggagacgcttgctcggatgagctcaggaaacagtaccggctgcgtggcaggtctgggtgttgtgtgcgaggacgtggcctttgaacaccgctgtgttctcagaggtccttaggagatatttttttttgtcttagggggactgtgttaagttcagacaaatcatgctgggtgtgtagagagtgtgaaatacgtcagtgaagtaagtagcagtgagcgattgtgaatgtgtaatgtaaatggaaaaccgggttttaccgtgttaagttattcactagggagccagtcgtagttctttgtaatcctctttcttccaaacctgctttgctgaaagttgcagaaaaggaagtgtgtggagagaaacagaacccttcagggtgggtcagaggacgccatccacagtggattcgtgttcgtttgcaggtggaagcagtgatttttaggacccactgattaaaaacaaacattcccaagtgtctctgagagatgctgtttatttgttaattaaaaagcttttttctctgtcttttaaattatggctttcatgtaataaggatatttttagtgaaaaattgttttcctttcaaattacagaccttttaaaaaaacttaatttgagcgagtaccttttcatttgacacttttcctgtttctaaccttaggaaaccagaatagcgtttggcagacacgacgttttcagtttacctttgacacctgccccactccattttgctttgtgatgtcttcatttaacaataaattatctgaaaaaacaaaa

SEQ ID NO: 57 - protein, 794 aa, Homo sapiens
MAGWIQAQQLQGDALRQMQVLYGQHFPIEVRHYLAQWIESQPWDAIDLDNPQDRAQATQLLEGLVQELQKKAEHQVGEDGFLLKIKLGHYATQLQKTYDRCPLELVRCIRHILYNEQRLVREANNCSSPAGILVDAMSQKHLQINQTFEELRLVTQDTENELKKLQQTQEYFIIQYQESLRIQAQFAQLAQLSPQERLSRETALQQKQVSLEAWLQREAQTLQQYRVELAEKHQKTLQLLRKQQTIILDDELIQWKRRQQLAGNGGPPEGSLDVLQSWCEKLAEIIWQNRQQIRRAEHLCQQLPIPGPVEEMLAEVNATITDIISALVTSTFIIEKQPPQVLKTQTKFAATVRLLVGGKLNVHMNPPQVKATIISEQQAKSLLKNENTRNECSGEILNNCCVMEYHQATGTLSAHFRNMSLKRIKRADRRGAESVTEEKFTVLFESQFSVGSNELVFQVKTLSLPVVVIVHGSQDHNATATVLWDNAFAEPGRVPFAVPDKVLWPQLCEALNMKFKAEVQSNRGLTKENLVFLAQKLFNNSSSHLEDYSGLSVSWSQFNRENLPGWNYTFWQWFDGVMEVLKKHHKPHWNDGAILGFVNKQQAHDLLINKPDGTFLLRFSDSEIGGITIAWKFDSPERNLWNLKPFTTRDFSIRSLADRLGDLSYLIYVFPDRPKDEVFSKYYTPVLAKAVDGYVKPQIKQVVPEFVNASADAGGSSATYMDQAPSPAVCPQAPYNMYPQNPDHVLDQDGEFDLDETMDVARHVEELLRRPMDSLDSRLSPPAGLFTSARGSLS

SEQ ID NO: 58 - DNA, 3770 bp, Homo sapiens
  source 1..3770: mol_type = other DNA
agtaacagccgccgctgccgccgccgccaggaaccccggccgggagcgagagccgcggggcgcagagccggcccggctgccggacggtgcggccccaccaggtgaacggccatggcgggctggatccaggcccagcagctgcagggagacgcgctgcgccagatgcaggtgctgtacggccagcacttccccatcgaggtccggcactacttggcccagtggattgagagccagccatgggatgccattgacttggacaatccccaggacagagcccaagccacccagctcctggagggcctggtgcaggagctgcagaagaaggcggagcaccaggtgggggaagatgggtttttactgaagatcaagctggggcactacgccacgcagctccagaaaacatatgaccgctgccccctggagctggtccgctgcatccggcacattctgtacaatgaacagaggctggtccgagaagccaacaattgcagctctccggctgggatcctggttgacgccatgtcccagaagcaccttcagatcaaccagacatttgaggagctgcgactggtcacgcaggacacagagaatgagctgaagaaactgcagcagactcaggagtacttcatcatccagtaccaggagagcctgaggatccaagctcagtttgcccagctggcccagctgagcccccaggagcgtctgagccgggagacggccctccagcagaagcaggtgtctctggaggcctggttgcagcgtgaggcacagacactgcagcagtaccgcgtggagctggccgagaagcaccagaagaccctgcagctgctgcggaagcagcagaccatcatcctggatgacgagctgatccagtggaagcggcggcagcagctggccgggaacggcgggccccccgagggcagcctggacgtgctacagtcctggtgtgagaagttggccgagatcatctggcagaaccggcagcagatccgcagggctgagcacctctgccagcagctgcccatccccggcccagtggaggagatgctggccgaggtcaacgccaccatcacggacattatctcagccctggtgaccagcacattcatcattgagaagcagcctcctcaggtcctgaagacccagaccaagtttgcagccaccgtacgcctgctggtgggcgggaagctgaacgtgcacatgaatcccccccaggtgaaggccaccatcatcagtgagcagcaggccaagtctctgcttaaaaatgagaacacccgcaacgagtgcagtggtgagatcctgaacaactgctgcgtgatggagtaccaccaagccacgggcaccctcagtgcccacttcaggaacatgtcactgaagaggatcaagcgtgctgaccggcggggtgcagagtccgtgacagaggagaagttcacagtcctgtttgagtctcagttcagtgttggcagcaatgagcttgtgttccaggtgaagactctgtccctacctgtggttgtcatcgtccacggcagccaggaccacaatgccacggctactgtgctgtgggacaatgcctttgctgagccgggcagggtgccatttgccgtgcctgacaaagtgctgtggccgcagctgtgtgaggcgctcaacatgaaattcaaggccgaagtgcagagcaaccggggcctgaccaaggagaacctcgtgttcctggcgcagaaactgttcaacaacagcagcagccacctggaggactacagtggcctgtccgtgtcctggtcccagttcaacagggagaacttgccgggctggaactacaccttctggcagtggtttgacggggtgatggaggtgttgaagaagcaccacaagccccactggaatgatggggccatcctaggttttgtgaataagcaacaggcccacgacctgctcatcaacaagcccgacgggaccttcttgttgcgctttagtgactcagaaatcgggggcatcaccatcgcctggaagtttgactccccggaacgcaacctgtggaacctgaaaccattcaccacgcgggatttctccatcaggtccctggctgaccggctgggggacctgagctatctcatctatgtgtttcctgaccgccccaaggatgaggtcttctccaagtactacactcctgtgctggctaaagctgttgatggatatgtgaaaccacagatcaagcaagtggtccctgagtttgtgaatgcatctgcagatgctgggggcagcagcgccacgtacatggaccaggccccctccccagctgtgtgcccccaggctccctataacatgtacccacagaaccctgaccatgtactcgatcaggatggagaattcgacctggatgagaccatggatgtggccaggcacgtggaggaactcttacgccgaccaatggacagtcttgactcccgcctctcgccccctgccggtcttttcacctctgccagaggctccctctcatgaatgtttgaatcccacgcttctctttggaaacaatatgcaatgtgaagcggtcgtgttgtgagtttagtaaggctgtgtacactgacacctttgcaggcatgcatgtgcttgtgtgtgtgtgtgtgtgtgtgtccttgtgcatgagctacgcctgcctcccctgtgcagtcctgggatgtggctgcagcagcggtggcctcttttcagatcatggcatccaagagtgcgccgagtctgtctctgtcatggtagagaccgagcctctgtcactgcaggcactcaatgcagccagacctattcctcctgggcccctcatctgctcagcagctatttgaatgagatgattcagaaggggaggggagacaggtaacgtctgtaagctgaagtttcactccggagtgagaagctttgccctcctaagagagagagacagagagacagagagagagaaagagagagtgtgtgggtctatgtaaatgcatctgtcctcatgtgttgatgtaaccgattcatctctcagaagggaggctggggttcattttcgagtagtattttatactttagtgaacgtggactccagactctctgtgaaccctatgagagcgcgtctgggcccggccatgtccttagcacaggggggccgccggtttgagtgagggtttctgagctgctctgaattagtccttgcttggctgcttggccttgggcttcattcaagtctatgatgctgttgcccacgtttcccgggatatatattctctcccctccgttgggccccagccttctttgcttgcctctctgtttgtaaccttgtcgacaaagaggtagaaaagattgggtctaggatatggtgggtggacaggggccccgggacttggagggttggtcctcttgcctcctggaaaaaacaaaaacaaaaaactgcagtgaaagacaagctgcaaatcagccatgtgctgcgtgcctgtggaatctggagtgaggggtaaaagctgatctggtttgactccgctggaggtggggcctggagcaggccttgcgctgttgcgtaactggctgtgttctggtgaggccttgctcccaaccccacacgctcctccctctgaggctgtaggactcgcagtcaggggcagctgaccatggaagattgagagcccaaggtttaaacttctctgaagggaggtggggatgagaagaggggtttttttgtactttgtacaaagaccacacatttgtgtaaacagtgttttggaataaaatatttttttcataaa

SEQ ID NO: 59-60 - skipped (2 entries)

SEQ ID NO: 61 - protein, 98 aa, Homo sapiens
MAAEPLTELEESIETVVTTFFTFARQEGRKDSLSVNEFKELVTQQLPHLLKDVGSLDEKMKSLDVNQDSELKFNEYWRLIGELAKEIRKKKDLKIRKK

SEQ ID NO: 62 - DNA, 1166 bp, Homo sapiens
  source 1..1166: mol_type = other DNA
ctcactaccgaaactcaccgaaggaaacagacgccagtgctcctcccggggctgccaccacggctccggcaggcgggccggggaccggccgaacctgagttgacggtggaggggctcgggttagctagatgggcggttggttagatgcgtaagcggtagtatgcgagctcagttcgttgttgctggttggctgtctagtcggccgatccgtctgctcacccggcctgccctttcctgcctttcgtctgcagcggccgccagctcctgctcggtgtccaaaacaaaatggccgccacgtccagtgcttgtctgaccggctaaaatggcgtctacgcaattacgtcaggcgtcagatccgcgcacgactagagggcgggaaagatttgagctacgcctgcgcagagttgagaagctgatgtctcctcgacttccaactggaaccttgaacccccacatttctggaccttgagcattcctcaagtaggaagatgtaatgcaccttgacctctttctaaataagacacttccccaaataaggggagttgagagtgaacagtcttcacgtctccacccacttccagatcccagaggagacagacatcggatggctgttacctcctcctaaaatgtctgcatttacccagataatcttccaatggaaatccatggttcaagtgccacctcttcaggaaagccatctgacttcaatcaggtcagccctgacaaaggtcagctagccccttgaggacatcagctttggcctcagggtcctaatggcagcagaaccactgacagagctagaggagtccattgagaccgtggtcaccaccttcttcacctttgcaaggcaggagggccggaaggatagcctcagcgtcaacgagttcaaagagctggttacccagcagttgccccatctgctcaaggatgtgggctctcttgatgagaagatgaagagcttggatgtgaatcaggactcggagctcaagttcaatgagtactggagattgattggggagctggccaaggaaatcaggaagaagaaagacctgaagatcaggaagaagtaaagccgcctggctgagatggggtgggcagggcagagctgatcagggccgagcagaaccgcactcttcccaaataaagcttcctccttgaaacacaaa

SEQ ID NO: 63 - protein, 574 aa, Homo sapiens
MPPQLQETRMNRSIPVEVDESEPYPSQLLKPIPEYSPEEESEPPAPNIRNMAPNSLSAPTMLHNSSGDFSQAHSTLKLANHQRPVSRQVTCLRTQVLEDSEDSFCRRHPGLGKAFPSGCSAVSEPASESVVGALPAEHQFSFMEKRNQWLVSQLSAASPDTGHDSDKSDQSLPNASADSLGGSQEMVQRPQPHRNRAGLDLPTIDTGYDSQPQDVLGIRQLERPLPLTSVCYPQDLPRPLRSREFPQFEPQRYPACAQMLPPNLSPHAPWNYHYHCPGSPDHQVPYGHDYPRAAYQQVIQPALPGQPLPGASVRGLHPVQKVILNYPSPWDHEERPAQRDCSFPGLPRHQDQPHHQPPNRAGAPGESLECPAELRPQVPQPPSPAAVPRPPSNPPARGTLKTSNLPEELRKVFITYSMDTAMEVVKFVNFLLVNGFQTAIDIFEDRIRGIDIIKWMERYLRDKTVMIIVAISPKYKQDVEGAESQLDEDEHGLHTKYIHRMMQIEFIKQGSMNFRFIPVLFPNAKKEHVPTWLQNTHVYSWPKNKKNILLRLLREEEYVAPPRGPLPTLQVVPL

SEQ ID NO: 64 - DNA, 5944 bp, Homo sapiens
  source 1..5944: mol_type = other DNA
gttcttctacttacctgggcccggagaaggtggagggagacgagaagccgccgagagccgactaccctccgggcccagtctgtctgtccgtggtggatctaagcctcatctgtatcctcttgtgatggcgtgaaggaaagccatggcagatttccagcctggtgatgctgtacagaacacaggtggcctgcttccatgcctcctcagcttcaagaaactagaatgaaccgaagcattcctgtggaggttgatgaatcagaaccatacccaagtcagttgctgaaaccaatcccagaatattccccggaagaggaatcagaaccacctgctccaaatataaggaacatggcacccaacagcttgtctgcacccacaatgcttcacaattcctccggagacttttctcaagctcactcaaccctgaaacttgcaaatcaccagcggcctgtatcccggcaggtcacctgcctgcgcactcaagttctggaggacagtgaagacagtttctgcaggagacacccaggcctgggcaaagctttcccttctgggtgctctgcagtcagcgagcctgcgtctgagtctgtggttggagccctccctgcagagcatcagttttcatttatggaaaaacgtaatcaatggctggtatctcagctttcagcggcttctcctgacactggccatgactcagacaaatcagaccaaagtttacctaatgcctcagcagactccttgggcggtagccaggagatggtgcaacggccccagcctcacaggaaccgagcaggcctggatctgccaaccatagacacgggatatgattcccagccccaggatgtcctgggcatcaggcagctggaaaggcccctgcccctcacctccgtgtgttacccccaggacctccccagacctctcaggtccagggagttccctcagtttgaacctcagaggtatccagcatgtgcacagatgctgcctcccaatctttccccacatgctccatggaactatcattaccattgtcctggaagtcccgatcaccaggtgccatatggccatgactaccctcgagcagcctaccagcaagtgatccagccggctctgcctgggcagcccctgcctggagccagtgtgagaggcctgcaccctgtgcagaaggttatcctgaattatcccagcccctgggaccacgaagagaggcccgcacagagagactgctcctttccggggcttccaaggcaccaggaccagccacatcaccagccacctaatagagctggtgctcctggggagtccttggagtgccctgcagagctgagaccacaggttccccagcctccgtccccagctgctgtgcctagaccccctagcaaccctccagccagaggaactctaaaaacaagcaatttgccagaagaattgcggaaagtctttatcacttattcgatggacacagctatggaggtggtgaaattcgtgaactttttgttggtaaatggcttccaaactgcaattgacatatttgaggatagaatccgaggcattgatatcattaaatggatggagcgctaccttagggataagaccgtgatgataatcgtagcaatcagccccaaatacaaacaggacgtggaaggcgctgagtcgcagctggacgaggatgagcatggcttacatactaagtacattcatcgaatgatgcagattgagttcataaaacaaggaagcatgaatttcagattcatccctgtgctcttcccaaatgctaagaaggagcatgtgcccacctggcttcagaacactcatgtctacagctggcccaagaataaaaaaaacatcctgctgcggctgctgagagaggaagagtatgtggctcctccacgggggcctctgcccacccttcaggtggttcccttgtgacaccgttcatccccagatcactgaggccaggccatgtttggggccttgttctgacagcattctggctgaggctggtcggtagcactcctggctggtttttttctgttcctccccgagaggccctctggcccccaggaaacctgttgtgcagagctcttccccggagacctccacacaccctggctttgaagtggagtctgtgactgctctgcattctctgcttttaaaaaaaccattgcaggtgccagtgtcccatatgttcctcctgacagtttgatgtgtccattctgggcctctcagtgcttagcaagtagataatgtaagggatgtggcagcaaatggaaatgactacaaacactctcctatcaatcacttcaggctacttttatgagttagccagatgcttgtgtatcctcagaccaaactgattcatgtacaaataataaaatgtttactcttttgtaagattatgttttacttatctcaaaggagatacatataatttataatgatatgggcagttgcttccagggacatcaacaaagctgcttagatataatattagataaatataacagaccactctgtattaatggattaaagccagctagttaaacaaccctttttaaccataatcatggaagctttattcttgcaataaagatttttaggctgggcgcagtgactcacacctgtaatcccagcactttgggaagctaaggcaggcagatcatttgaggtcaggagtttgagaccagcctggccaacatggtgaaaccccatctctgctaaaattacaaaaaagttagccgggcatggtggtgtgcacctgtaatcccagctactcgggaggctgaggcaggagaatcacttgaacccgggaggcagaggttgcagtgagccgagatcatgtcactgcactctagcttgggagacagagcgagactccgtctcaaaaaacaaacaaacaaataaaaacacccatttttaacaaaacaactttatatagcatacagccatgattctaaatagtatgattatggttctcaggatctgactacataggtaaaaatatttgcatatgtgtatgaagtgttgggggatgtaggctagaattgtagtctgtgttctaattttggttctaccaccaattagctgtatgacctttagcaagtcctttaacttttcttagattccagggactcatttataaaatgacatggacaaaagcatctctaatcactctaaaagatttgaagtctaggacctaaattctaaatactcttttgaggagtgactgagttttcattttcataattatgtctctcagaggacaaatttacattttcttaacagagacattttcttcttctttttttttgtttgagacagagtctcgctctgtcgtccaggctggagtgcagtgctgcaatcttggctcactgcaacctgcgcctcctgggttcaagtgattcttctgcctcaacctcccaagtagctagacctataggcgcctgccaccatgcccagctaatttttgtatttttagtagagacagggtttcatattggccagactggtctcgaactcctgaccttgtgatccgcccacctcggcctcccaaagtgctgggattacaggtgtgagccaccacacccagccaacattttcctcttttaaaaaatatcttctcacgcctgtaatcccagcactttgggaggctgaggcaggcggatcatgaggtcaggagatcaagaccatcctggctaacacggtgaaactccatctctactaaaaatacaaaaaaaatagccgggcgtggtggcaggcgcctgtagtcccagctactggggaggctgaggcaggaaaatggtgtcaacccgggaggcggagcttgcagtgagccgagattgcgccactgcactccagcctgggcaatagagtgagactccgtctcaaaaaaaaaaaaaaaaaaaaaaacttcaacaataccctcaggttgataattttggatatctatctgtatctatatatcttgtttacctggtctccagaaaaagaacacatacacatatccatatataaaatatgtatacatgtatcaaatctacgtaaactataaaggtgggatggctttaattatggcccaagctactaagacaatgaagactttttggggctgcaagctactgcttcccttctttatctactagcctcttaaacaaggctcacttgtgctacaagacagtccaccgttttgttttttttttcttttttttgagacagggtctcactctttcccaggctgcagtacagtgacacagtctcagctcactgcagctttgaccttgccgggctcaggtgacccttacacttcagcctcccaagtagcagggactataggtgtgcaccaacatgcttggttaatttttgtattttttgtagagacagggttttgccatgttgtccaggctagtctcgaattcctgggctcaagtgattcacctgccttggcctcccaaagtgctaggattacagatgggagccaccacgcccagcccagtccagctcttatatgtagcacagggaaaggacaaatacttgtcaactataaataagaaacattgctaatgcattgcaaagaacactagtttcatttactttataacttagatgtctactgggtgagacgaatgtctttgttctttaaaaaataggaaaagagaagaaaaactagcataacataagtactcatttgtaagactttctgacatgtaacattagttccgtagttttgagacctggtagaactgactttcatatttggataacctggaaaacacccaaacacaaacttcaagtcttctttctcttttttcattatcttttttagtctgaggtgacaccatcattaaggattcgacacccgtttgtaaataaaatgacatcagcaattactctgaaatgtttctagtttgcaaagacttagcaatgtgatgttattaacccttcctcccttcagagacctgtcctaagctctgaaccactcattccttccactcttcttaccccaggtggttgatgagcagtggtccctggtgttccacaaagagtcattaaagtgttacagctggtagcactggtagcaaaaaaacaaaccaaaaagtacacacagacacacacacacacacgcacacatacacacacacacgcacttggccaagtgacaaaagcttggcccctgaaatttctatgagatccgatgaccaccaacatcaaagcatttttttttttttttttttgagacgtagtctcgctctgtcacccaggctagagtgcagtggtgcaatcacagctcactgcaacctccacctcccgggttcaagcgattctcctgcctcagcctctcgagtagctgtgactacaggcacctgccaccatgcccggctaattttttgtatttttagtagagacggggtttcaccgtgttagccaggatggtcttgatctcctgacctcgtgatccatccgcctcggcctcccaaattgctgggattacaggcatgagccaccacgcccggcccatcaaaggaattgtaacaactatttgagagcactgacaataagattaacactcggttgatttagatgttatgctggtcctcaggcattcatctttagatatttttggggtggaagtggggtagggctgacttagtaaaaataacctcttagcccaaaggctttattcagacttacaccgatttgaggggtgggtttgtggaatgcaaggttaggttcttacctaatatttgatgactaatttagaattttaaatgtaattttaaattttagtgactggtttcaaatctattttaacttctagattgttcaaagaggtctcagtacatggctacaatcaaagtattagactagctatttctcagctcagtgctcagaaaaattattactgttgatacctttttctttgtttcctgttaaataaatcacctctttaaagaca

SEQ ID NO: 65 - protein, 74 aa, Homo sapiens
MTNVYSLDGILVFGLLFVCTCAYFKKVPRLKTWLLSEKKGVWGVFYKAAVIGTRLHAAVAIACVVMAFYVLFIK

SEQ ID NO: 66 - skipped

SEQ ID NO: 67 - protein, 191 aa, Homo sapiens
MAGAAEDARALFRAGVCAALEAWPALQIAVENGFGGVHSQEKAKWLGGAVEDYFMRNADLELDEVEDFLGELLTNEFDTVVEDGSLPQVSQQLQTMFHHFQRGDGAALREMASCITQRKCKVTATALKTARETDEDEDDVDSVEEMEVTATNDGAATDGVCPQPEPSDPDAQTIKEEDIVEDGWTIVRRKK

SEQ ID NO: 68 - DNA, 4076 bp, Homo sapiens
  source 1..4076: mol_type = other DNA
gtggactggggccggataatggcgggcgctgcagaagatgcgcgagctcttttccgggctggggtctgcgcggccctggaggcctggccggccttgcagatcgctgtggagaatggcttcgggggtgtgcacagccaggagaaggccaagtggctggggggtgcagtggaggattacttcatgcgcaatgctgacttggagctagatgaggtggaagacttccttggagagctgttgaccaacgagtttgatacagttgtggaagacgggagtctgccccaggtgagccagcaactgcagaccatgttccaccacttccagaggggtgatggggctgctctgagggagatggcctcctgcatcactcagagaaaatgcaaggtcacagccactgcacttaagacagctagagagactgatgaggatgaagatgatgtggacagtgtggaagagatggaggtcacagctacgaatgatggggctgctacagatggggtctgcccccagcctgaaccctctgatccagacgctcagactattaaggaagaggatatagtggaagatggctggaccattgtccggagaaaaaaatgagtggggatgattggaaatggctttgggcccttatttgctgttctaagagttgtctgtaggggttttttttttgaggattgcagacctgtggactggttaccccatctccaccctctcccctgttcctctgtctggctccctccagggcaaggaaaacctagggtccttggtcttgggggtggggggaccttttccagcatattcccctgggcctttagttaacatccgagtgacgaagccgggttccccagtacagtgtcttttgggtgcggtcattgtgaggaaggggatgagtgagtgtgggtgtggctggaggaggagctagatgccggtggacagtgggcaggtggatttggggaggagaggatcagcagcagcagcagtactcagtgatagggggctggctgggtcaggaatggtgagatgaacatgcaagtggaagagagaatagttgaaaatgtgaatgaaagtagctctggagcctctcccttaccccaccccacacacacgcaacagctctgtacccctgcccagaacttggaacctcccaggaatgctgccttccttcagcccagcctccagtcctgggttccctcaggaattcgaagaccttggctaggtggtgagcttggaagagctgggctttgttttctgtctcctctaacctctttccttactccttatcccatcccatttgagttcaggggtgaggcttaagatcttaataaataataccttactgcttaatctgtggcttgacctgtgagtagtagccttagaatcagccttctgggagctcagcttcagagtttacaagggagcagtttctgggcccaccctagcagcctggtactttggacaaccaaacagatgaacgaacggagcacagcagtgctatgaaagttactgtaagcctgaaataaactgtatttttcttaaaaaaaaaaaaacacacaaaaaaacacaaaaaactgagtatccattgtcctcccccctgtttccctgtcctgcccgctggccctgccatgggtctggacgataaaatactgggtagccttggggccgggtagaagctgtaagccatgggagaggcaggagaggtctagttgccaccccacgtggagttgtacgtgtgaagacactggctgaggaggcagggctgggtcggggccccagggtcagtggcagagctggcacttgaatccaggtctcctacctctggtgctttgtggggaactgggtggaggcaggatctgtggtagggtattgagggatgagggagaaaaacgacctaattcaggtaggactggcaacggctcccaccctccctggggacagggattaataaaaattgacatcactgtaggaatatattttttaaaagcccacgttttgtgaaaagatgaattaaaaaacccaagacccagcattcgggattgaaagtgcccgtgatgggagttcaagtattgactgagctgggagggaaggggctagagcccccaatcagacatgggcaactagagtgtggggtgggggctcccagtttgtcccaaaccctctaggtcttgtctcgggtctggggggattcggggggttcagcagtggctcctaaagcagccaccggtgcctcctccatctccctgtcctcagacagtgtgggccccgggcagaacgtgtcccctcggcccgcccggccaagcacagccatccagcgtcgctgtagttcctctgtctcagggctgaagtaccagctgaggtggctctgggtgatcttgaagacatgccttctgtcaggccgctcccctgcctcgggcggtcccacctcgaagccaatgaggggcaggctgcgctgggctttcacatcctggcgggaggagggacagagctggggccaccttggggctagacctttcccccgccccagcttctaactggttttgcatatgctctgtcttcagtcccctactcaggaactcccctactcaggaaccttccgtggctccagtgttatcaacaggaacatgtcagaactggggctaaaatgcaggctggtttaaatacctgtctccccccacccccgcctcttctcacaaaactgctgggctagtctctttagcataccaaataatgttttcaggcctttgtctatgctattgcccctatctgcatacttttttttttttttttttttgagacagagtcttgccctgttgcccaggctggagtgcagtggcatgaacttggctcactgcaacctctacctcccaggttcaagcaattctcctgcctcagcttcctgagtagctgggactacaggcacacgtcaccacgccaggctaatttttgtatttttagtagagacggggtttcaccatgttggccaggctggtcttgaactcctgatctcaggtgagccacctgcctcggcctctcagagtgctgggattacaggcgtgagccactgcgctcggtcccatctgcatactcttacccactccaaattggacctagcagttccccatctctactccttccaggaagccaggcccacaactcatcctggttttccctacataccacaaccactccttgtctctagccagtctttgtctctcaagggttggggttctgatttcctcttagagataggctcaccttatcttccaaggctcaccttatcttccaaggccaaggagaggtcaaggactggatctggctttgccaggtggctgaaaggacccgaaggagtaggatgcatacctgaggggctccgtagatatacagcaccaagggttcattttcagggaccacgaaccatgccttgtgccatcctttgccacccttctccatgtagtgcaggaagctgcagatgacgctgttctctgcagccactgaggcctgtttctgtggccagagacaccgggcatcaatgttgacagaaggcctagcctggctcctcctagctttaatacctcctcagtgtagggactgctattcctatctcagatgaagacgctcaagctcaggtggcaggagtgatttgtccagtgccacccagtgaatcagctagagctgagattcaaagctaggttcgtctgcctcatttgggcaacggctgctgcctctacaggccagtggaaggagtgtgcggatctcaggcattctttcttcagtcagagcattcattcctcaagccattcacacatttaggcctcatgcttttttctgtctttcatcacatccatttcctacactcattgagaggtaatctagcattgtggttttaagggggtatgtgggtggttaatgaagtctggcttagaatcccagctctagatgaaaatgtattgacttggagagcaaagagagctgatgtgagaattaaatgaattaatatatgcaaagtgcttagaatagttcctggcacagagtaagtactcttttaagtgttaaataaatacctagatttgtttttaaaaaaa

SEQ ID NO: 69 - protein, 845 aa, Homo sapiens
MELWRQCTHWLIQCRVLPPSHRVTWDGAQVCELAQALRDGVLLCQLLNNLLPHAINLREVNLRPQMSQFLCLKNIRTFLSTCCEKFGLKRSELFEAFDLFDVQDFGKVIYTLSALSWTPIAQNRGIMPFPTEEESVGDEDIYSGLSDQIDDTVEEDEDLYDCVENEEAEGDEIYEDLMRSEPVSMPPKMTEYDKRCCCLREIQQTEEKYTDTLGSIQQHFLKPLQRFLKPQDIEIIFINIEDLLRVHTHFLKEMKEALGTPGAANLYQVFIKYKERFLVYGRYCSQVESASKHLDRVAAAREDVQMKLEECSQRANNGRFTLRDLLMVPMQRVLKYHLLLQELVKHTQEAMEKENLRLALDAMRDLAQCVNEVKRDNETLRQITNFQLSIENLDQSLAHYGRPKIDGELKITSVERRSKMDRYAFLLDKALLICKRRGDSYDLKDFVNLHSFQVRDDSSGDRDNKKWSHMFLLIEDQGAQGYELFFKTRELKKKWMEQFEMAISNIYPENATANGHDFQMFSFEETTSCKACQMLLRGTFYQGYRCHRCRASAHKECLGRVPPCGRHGQDFPGTMKKDKLHRRAQDKKRNELGLPKMEVFQEYYGLPPPPGAIGPFLRLNPGDIVELTKAEAEQNWWEGRNTSTNEIGWFPCNRVKPYVHGPPQDLSVHLWYAGPMERAGAESILANRSDGTFLVRQRVKDAAEFAISIKYNVEVKHIKIMTAEGLYRITEKKAFRGLTELVEFYQQNSLKDCFKSLDTTLQFPFKEPEKRTISRPAVGSTKYFGTAKARYDFCARDRSELSLKEGDIIKILNKKGQQGWWRGEIYGRVGWFPANYVEEDYSEYC

SEQ ID NO: 70 - DNA, 2892 bp, Homo sapiens
  source 1..2892: mol_type = other DNA
agcactagctgtcgctccacaggcgagcagggcaggcgtgcgggcgggtgggtggtggaggctgcgagggtgcacggccggccctgggcaggcggtagccatggagctgtggcgccaatgcacccactggctcatccagtgccgggtgctgccgcccagccaccgcgtgacctgggatggggctcaggtgtgtgaactggcccaggccctccgggatggtgtccttctgtgtcagctgcttaacaacctgctaccccatgccatcaacctgcgtgaggtcaacctgcgcccccagatgtcccagttcctgtgccttaagaacattagaaccttcctgtccacctgctgtgagaagttcggcctcaagcggagcgagctcttcgaagcctttgacctcttcgatgtgcaggattttggcaaggtcatctacaccctgtctgctctgtcctggaccccgatcgcccagaacagggggatcatgcccttccccaccgaggaggagagtgtaggtgatgaagacatctacagtggcctgtccgaccagatcgacgacacggtggaggaggatgaggacctgtatgactgcgtggagaatgaggaggcggaaggcgacgagatctatgaggacctcatgcgctcggagcccgtgtccatgccgcccaagatgacagagtatgacaagcgctgctgctgcctgcgggagatccagcagacggaggagaagtacactgacacgctgggctccatccagcagcatttcttgaagcccctgcaacggttcctgaaacctcaagacattgagatcatctttatcaacattgaggacctgcttcgtgttcatactcacttcctaaaggagatgaaggaagccctgggcacccctggcgcagccaatctctaccaggtcttcatcaaatacaaggagaggttcctcgtctatggccgctactgcagccaggtggagtcagccagcaaacacctggaccgtgtggccgcagcccgggaggacgtgcagatgaagctggaggaatgttctcagagagccaacaacgggaggttcaccctgcgggacctgctgatggtgcctatgcagcgagttctcaaatatcacctccttctccaggagctggtgaaacacacgcaggaggcgatggagaaggagaacctgcggctggccctggatgccatgagggacctggctcagtgcgtgaacgaggtcaagcgagacaacgagacactgcgacagatcaccaatttccagctgtccattgagaacctggaccagtctctggctcactatggccggcccaagatcgacggggaactcaagatcacctcggtggaacggcgctccaagatggacaggtatgccttcctgctcgacaaagctctactcatctgtaagcgcaggggagactcctatgacctcaaggactttgtaaacctgcacagcttccaggttcgggatgactcttcaggagaccgagacaacaagaagtggagccacatgttcctcctgatcgaggaccaaggtgcccagggctatgagctgttcttcaagacaagagaattgaagaagaagtggatggagcagtttgagatggccatctccaacatctatccggagaatgccaccgccaacgggcatgacttccagatgttctcctttgaggagaccacatcctgcaaggcctgtcagatgctgcttagaggtaccttctatcagggctaccgctgccatcggtgccgggcatctgcacacaaggagtgtctggggagggtccctccatgtggccgacatgggcaagatttcccaggaactatgaagaaggacaaactacatcgcagggctcaggacaaaaagaggaatgagctgggtctgcccaagatggaggtgtttcaggaatactacgggcttcctccaccccctggagccattggaccctttctacggctcaaccctggagacattgtggagctcacgaaggctgaggctgaacagaactggtgggagggcagaaatacatctactaatgaaattggctggtttccttgtaacagggtgaagccctatgtccatggccctcctcaggacctgtctgttcatctctggtacgcaggccccatggagcgggcaggggcagagagcatcctggccaaccgctcggacgggactttcttggtgcggcagagggtgaaggatgcagcagaatttgccatcagcattaaatataacgtcgaggtcaagcacattaaaatcatgacagcagaaggactgtaccggatcacagagaaaaaggctttccgggggcttacggagctggtggagttttaccagcagaactctctaaaggattgcttcaagtctctggacaccaccttgcagttccccttcaaggagcctgaaaagagaaccatcagcaggccagcagtgggaagcacaaagtattttggcacagccaaagcccgctatgacttctgcgcccgagaccgatcagagctgtcgctcaaggagggtgacatcatcaagatccttaacaagaagggacagcaaggctggtggcgaggggagatctatggccgggttggctggttccctgccaactacgtggaggaagattattctgaatactgctgagccctggtgccttggcagagagacgagaaactccaggctctgagcccggcgtgggcaggcagcggagccaggggctgtgacagctcccggcgggtggagactttgggatggactggaggaggccagcgtccagctggcggtgctcccgggatgtgccctgacatggttaatttataacaccccgatttcctcttgggtcccctcaagcagacggggctcaagggggttacatttaataaaaggatgaagatgga

SEQ ID NO: 71 - protein, 564 aa, Homo sapiens
MLGFPPGRPQLPVQLRPQTRMATALRDPASGSVTFEDVAVYFSWEEWDLLDEAQKHLYFDVMLENFALTSSLGCWCGVEHEETPSEQRISGERVPQFRTSKEGSSSQNADSCEICCLVLRDILHLAEHQGTNCGQKLHTCGKQFYISANLQQHQRQHITEAPFRSYVDTASFTQSCIVHVSEKPFTCREIRKDFLANMRFLHQDATQTGEKPNNSNKCAVAFYSGKSHHNWGKCSKAFSHIDTLVQDQRILTREGLFECSKCGKACTRRCNLIQHQKVHSEERPYECNECGKFFTYYSSFIIHQRVHTGERPYACPECGKSFSQIYSLNSHRKVHTGERPYECGECGKSFSQRSNLMQHRRVHTGERPYECSECGKSFSQNFSLIYHQRVHTGERPHECNECGKSFSRSSSLIHHRRLHTGERPYECSKCGKSFKQSSSFSSHRKVHTGERPYVCGECGKSFSHSSNLKNHQRVHTGERPVECSECSKSFSCKSNLIKHLRVHTGERPYECSECGKSFSQSSSLIQHRRVHTGKRPYQCSQCGKSFGCKSVLIQHQRVHIGEKP

SEQ ID NO: 72 - skipped

SEQ ID NO: 73 - protein, 283 aa, Homo sapiens
MAGNFWQSSHYLQWILDKQDLLKERQKDLKFLSEEEYWKLQIFFTNVIQALGEHLKLRQQVIATATVYFKRFYARYSLKSIDPVLMAPTCVFLASKVEEFGVVSNTRLIAAATSVLKTRFSYAFPKEFPYRMNHILECEFYLLELMDCCLIVYHPYRPLLQYVQDMGQEDMLLPLAWRIVNDTYRTDLCLLYPPFMIALACLHVACVVQQKDARQWFAELSVDMEKILEIIRVILKLYEQWKNFDERKEMATILSKMPKPKPPPNSEGEQGPNGSQNSSYSQS

SEQ ID NO: 74 - DNA, 2153 bp, Homo sapiens
  source 1..2153: mol_type = other DNA
gtcgccgccgcggagcggagtcgagccgagctgatttgatcgaggagcgcggttaccggacgggctgggtctatggtcgctccgcgggccgctccgccggctggtgcttttttatcagggcaagctgtgttccatggcagggaacttttggcagagctcccactatttgcaatggattttggataaacaagatctgttgaaggagcgccaaaaggatttaaagtttctctcagaggaagaatattggaagttacaaatattttttacaaatgttatccaagcattaggtgaacatcttaaattaagacaacaagttattgccactgctacggtatatttcaagagattctatgccaggtattctctgaaaagtatagatcctgtattaatggctcctacatgtgtgtttttggcatccaaagtagaggaatttggagtagtttcaaatacaagattgattgctgctgctacttctgtattaaaaactagattttcatatgcctttccaaaggaatttccttataggatgaatcatatattagaatgtgaattctatctgttagaactaatggattgttgcttgatagtgtatcatccttatagacctttgctccagtatgtgcaggacatgggccaagaagacatgttgcttccccttgcatggaggatagtgaatgatacctacagaacggatctttgcctactgtatcctcctttcatgatagctttagcttgcctacatgtagcctgtgttgtacagcagaaagatgccaggcaatggtttgctgagctttctgtggatatggaaaagattttggaaataatcagggttattttaaaactatatgagcagtggaagaatttcgatgagagaaaagagatggcaaccattcttagtaagatgccaaaaccaaaaccacctccaaacagtgaaggagagcagggtccaaatggaagtcagaactctagctacagccaatcttaaaacattccgaagaattccatagtggaccacttggaaataaaccattggacagatttcagtaatgtcttcagtggaacacaaatgaaaatgaatagcttgtttctgtcaagcatattggaaagtgattttatttttgcaaaataagtttttctttaatatgattctagtacataattgattaaaatctcttgattataaatgtttggaaaggttctaaggggacctacagacagacatacatagacatttcaaaattaatagcttttgattagtataatatttcttaatttggataataaaaattgtagctttttattaagccaggaaacatgaagcataatttgtttaaaattctctttggtcattgagggaccaaaaaaggacgtaaaatttacagtcaatctatgagggtttttttccctccataagtttaactttaaaactgtatttaaggaatcaaatcttacaaaatcctggaagattttggtaatgatgttgataatttcagggaaattaatcaagtacctatattgatttaaaagtgtattttattcagtagtttgaggatcttgccatggaagatactagcccagcctagcagaaaagtgcaatatgtatagcatactttgacattttaaacatgatagtccataaccattttgaaatgctgggcaaactacatgaagttatttataattaattcacagctaatcaggcattttgaaagcttaattggattcaaaaaccataatgttggaatttggtaaaattttaatgttgatttttactgtgaaaaggtttttataagatatacacaccctagtttaatgttgtgtcttggtgtggatttacagatttactacaggtattctgaaccaggaacacaatcaggtttcaggccagtttgatactggctgtccttaattctaatatgagagtaggacatcatactaaatgttatgtcagtgggactgtactgtctgtggaacttagcaaattaatcattttcttcagacttgaaggagagtgataaataaaatttggagtcataggatattgatgcacaatttaaggattaaacatttttaatcaattgtggatgatggcttattaaatgttgacttcctagtataaaactgcaagaataaaagtaacttctccagctgta

SEQ ID NO: 75 - protein, 118 aa, Homo sapiens
MDVFLMIRRHKTTIFTDAKESSTVFELKRIVEGILKRPPDEQRLYKDDQLLDDGKTLGECGFTSQTARPQAPATVGLAFRADDTFEALCIEPFSSPPELPDVMKPQDSGSSANEQAVQ

SEQ ID NO: 76 - DNA, 974 bp, Homo sapiens
  source 1..974: mol_type = other DNA
gcggctgcgccggcgcgtcgaggggagaggcagcagccgcgatggacgtgttcctcatgatccggcgccacaagaccaccatcttcacggacgccaaggagtccagcacggtgttcgaactgaagcgcatcgtcgagggcatcctcaagcggcctcctgacgagcagcggctgtacaaggatgaccaactcttggatgatggcaagacactgggcgagtgtggcttcaccagtcaaacagcacggccacaggccccagccacagtggggctggccttccgggcagatgacacctttgaggccctgtgcatcgagccgttttccagcccgccagagctgcccgatgtgatgaagccccaggactcgggaagcagtgccaatgaacaagccgtgcagtgaggacccccaagaggcccatttcccccaataaaagagatttgggagtctgcctggttgctgcctctttttcccgcccctccctgggatgggtcccactccctgtgggctccttttggggcttgtgcttggcagttcctgtgctgtcctgtctcccagatcctgagaccctggctgagaacttggcccagcctgctgcttaaaggcaccatggggacctgggttgccctgagacccaagccattgttagcagctagccagccacaccaaccacgccagggggaggaaagggaaggactgggagagacacaaagaccagagccagcctcagggacaagagattccagttttaggcctttctccttctaagtgccccccacccccatagcctgcatgtccactcccagacgatggccaagagcagaaacacaagctggagccagtgtcctggtttgacagcatgttcaacgagggaaccccaagacggacccacacaggtccacccacgctgggggctgtaatcacggagggaagtggctgcccccttaacacacctttaataaacagtctacagaccca

SEQ ID NO: 77 - protein, 112 aa, Homo sapiens
MDGEEKTYGGCEGPDAMYVKLISSDGHEFIVKREHALTSGTIKAMLSGPGQFAENETNEVNFREIPSHVLSKVCMYFTYKVRYTNSSTEIPEFPIAPEIALELLMAANFLDC

SEQ ID NO: 78 - DNA, 1943 bp, Homo sapiens
  source 1..1943: mol_type = other DNA
cagacggaagtgagcgacacactctgcgtcctcgcctcaccaggaaactactaaagttcctggggaagcaaagtagaatttcataagaacaaaatggatggagaggagaaaacctatggtggctgtgaaggacctgatgccatgtatgtcaaattgatatcatctgatggccatgaatttattgtaaaaagagaacatgcattaacatcaggcacgataaaagccatgttgagtggcccaggtcagtttgctgagaacgaaaccaatgaggtcaattttagagagataccttcacatgtgctatcgaaagtatgcatgtattttacgtacaaggttcgctacactaacagctccaccgagattcctgaattcccaattgcacctgaaattgcactggaactgctgatggctgcgaacttcttagattgttaaataaaataaattataataaactgttaactcttttcagtatttaatacctgtagttcagttagtaactttttcatatatagcatgttgcctgtatgcagttgaactatataaagttcattgcaaagcagattatcttgtttttttgcatagcaatcaaagttgaaatttgtttgctacatcaacaaattaaggacattttcacaaactgagaaataaacaaatatgccaattcgtaggtggttttgccttatcctttgaatgtgacttaaaatcagcaatgatgatatagtaaatactgaaatttaggtgtaaatcaatacgttctacagggaaataatgaggctaagtatttttatgtttttagtggttttttagaaacctaatcttatagccgccattagcattactagagttatgcaaataattgcattataaacatgtttataacttagccaaaacattgatttttataactctccaagtatgagttgaaatttcttatgtcttttgataaactgcagtattctttaagtgtactttgtccttttgtttattgctacaatttaagaactttatttaaaaacaattttggaaggttactaggtacagcttttgcagaagaaactgaactgtagccagatggtcagcaagtaaactacatgacttagagttcttgtgcattatacattttgggtaattcaaagtactgtatttgcattgactataaagcgtcgtttgcaatatttattcttccttcatagtcccttgttgtgattatacttccagttgtttaaatgtattttaaaagactcactattaactttattcagatcttaaaagctacacctttttgaactattccagtctttctccatccaattagaatgttatggaataacatgtgaagagatacagtgaaaatcatattataatgcattgaagatatcctacatgaattatcttctattaaaatatgtcccaataaatatacccataatcagtgggtcttctactgaaatcaagctcattcagcttttctattaagcagccaaaaaattttttgaaaaaatatgacagcatcattccttatgcatggggaaagaagcactggagatgggtttagtattgtctttatctcagaggtggaacaaagttgtcattatagggtctataaacttaagtctccagcttatttgagactggcttaatatggctgagcccggtggctcatgcctgtaatcccagcactttcagaggacgaggcgggtagatcacttgaggccaggagtttgagaccagcctggccaccatggcaaaaccccatctctaccaaaaatgcaaaaattagctaggccatggtggcacacgcctgtaatcccagctacttgtgaggctgaggcatgagaatcgcttgaacctgggaggtggaggtggcagtgagccgagatcgcaccactgcactccagcctgggtgacagagcgagactgtctcaaaaaaaaaaaaaaaaaaa

SEQ ID NO: 79 - protein, 124 aa, Homo sapiens
MVPRISAAIFIFELLGSNSEGVTDLRLWLCQPAPRCGEWTYNPLEQCCDDGVILDLNQTRLCGSSCTFWPCFQHCCLESLGSQNQTVVRFKVPGMKPDCKSSPITRICAQEYHPKSPVSRSDLI

SEQ ID NO: 80 - DNA, 1125 bp, Homo sapiens
  source 1..1125: mol_type = other DNA
ccactgctgctccctcgtccgctgctctgaagcctaacccatggtgcccagaatttctgctgccatcttcatttttgaacttttgggttcaaactcagaaggagtcacagatcttagactgtggctatgccagccagcgcccaggtgcggggagtggacctacaaccccttggagcagtgctgtgatgacggtgtcatcctagacttgaaccagacccggctctgcggctccagctgcaccttctggccctgcttccagcactgctgcctggagtctttgggctctcagaaccagacagttgtgaggttcaaggtcccaggcatgaagccagattgcaagtcctcccctatcaccaggatctgtgcccaggaataccacccaaaaagccctgtgtcaagatctgacctcatctagactgttctggggtagcagagtcacagatcactctagaatctaatacttggtaattatactgcattgattttgttgttgttgtgacagagtttcactctgtcccccaggctggagtgcaaataagcaacttcagcaaagtctcaggatacaaaatcaatgtacaaaaatcacaagcattcttatacaccaacaacagacaaacagagagccaaatcatgagtgaactcccattcacaattgcttcacagagaataaaatacctaggaatccaacttacaagggatgtgaaggacctcttcaaggagaactacaaaccactgctcaaggaaataaaagaggatacaaacaaatggaagaacattccatgctcatgggtaggaagaatcaatatcgtgaaaatggccatactgcccaaggtaatttacagattcaatgccatccccatcaagctaccaatgactttcttcacagaattggaaaaaactactttaaagttcatatggaaccaaaaaagagccctcatcgccaagtcaatcctaagccaaaagaacaaagctggaggcatcacactacctgacttcaaactatactataaggctacagtaaccaaaacagcatggtactggtaccaaaacagagatatagatcaatggaacagaacagagccctcagaaataacgccgcatatctacaactatctgatctttgac

SEQ ID NO: 81 - protein, 1581 aa, Homo sapiens
MKAQGETEESEKLSKMSSLLERLHAKFNQNRPWSETIKLVRQVMEKRVVMSSGGHQHLVSCLETLQKALKVTSLPAMTDRLESIARQNGLGSHLSASGTECYITSDMFYVEVQLDPAGQLCDVKVAHHGENPVSCPELVQQLREKNFDEFSKHLKGLVNLYNLPGDNKLKTKMYLALQSLEQDLSKMAIMYWKATNAGPLDKILHGSVGYLTPRSGGHLMNLKYYVSPSDLLDDKTASPIILHENNVSRSLGMNASVTIEGTSAVYKLPIAPLIMGSHPVDNKWTPSFSSITSANSVDLPACFFLKFPQPIPVSRAFVQKLQNCTGIPLFETQPTYAPLYELITQFELSKDPDPIPLNHNMRFYAALPGQQHCYFLNKDAPLPDGRSLQGTLVSKITFQHPGRVPLILNLIRHQVAYNTLIGSCVKRTILKEDSPGLLQFEVCPLSESRFSVSFQHPVNDSLVCVVMDVQDSTHVSCKLYKGLSDALICTDDFIAKVVQRCMSIPVTMRAIRRKAETIQADTPALSLIAETVEDMVKKNLPPASSPGYGMTTGNNPMSGTTTPTNTFPGGPITTLFNMSMSIKDRHESVGHGEDFSKVSQNPILTSLLQITGNGGSTIGSSPTPPHHTPPPVSSMAGNTKNHPMLMNLLKDNPAQDFSTLYGSSPLERQNSSSGSPRMEICSGSNKTKKKKSSRLPPEKPKHQTEDDFQRELFSMDVDSQNPIFDVNMTADTLDTPHITPAPSQCSTPPTTYPQPVPHPQPSIQRMVRLSSSDSIGPDVTDILSDIAEEASKLPSTSDDCPAIGTPLRDSSSSGHSQSTLFDSDVFQTNNNENPYTDPADLIADAAGSPSSDSPTNHFFHDGVDFNPDLLNSQSQSGFGEEYFDESSQSGDNDDFKGFASQALNTLGVPMLGGDNGETKFKGNNQADTVDFSIISVAGKALAPADLMEHHSGSQGPLLTTGDLGKEKTQKRVKEGNGTSNSTLSGPGLDSKPGKRSRTPSNDGKSKDKPPKRKKADTEGKSPSHSSSNRPFTPPTSTGGSKSPGSAGRSQTPPGVATPPIPKITIQIPKGTVMVGKPSSHSQYTSSGSVSSSGSKSHHSHSSSSSSSASTSGKMKSSKSEGSSSSKLSSSMYSSQGSSGSSQSKNSSQSGGKPGSSPITKHGLSSGSSSTKMKPQGKPSSLMNPSLSKPNISPSHSRPPGGSDKLASPMKPVPGTPPSSKAKSPISSGSGGSHMSGTSSSSGMKSSSGLGSSGSLSQKTPPSSNSCTASSSSFSSSGSSMSSSQNQHGSSKGKSPSRNKKPSLTAVIDKLKHGVVTSGPGGEDPLDGQMGVSTNSSSHPMSSKHNMSGGEFQGKREKSDKDKSKVSTSGSSVDSSKKTSESKNVGSTGVAKIIISKHDGGSPSIKAKVTLQKPGESSGEGLRPQMASSKNYGSPLISGSTPKHERGSPSHSKSPAYTPQNLDSESESGSSIAEKSYQNSPSSDDGIRPLPEYSTEKHKKHKKEKKKVKDKDRDRDRDKDRDKKKSHSIKPESWSKSPISSDQSLSMTSNTILSADRPSRLSPDFMIGEEDDDLMDVALIGN

SEQ ID NO: 82 - DNA, 8137 bp, Homo sapiens
  source 1..8137: mol_type = other DNA
gaagttccgttggggaagatggcggcggcctcgagcacccttctcttcttgccgccggggacttcagattgatccttcccgggaagagtagggactgctggtgccctgcgtcccgggatcccgagccaacttgtttcctccgttagtggtggggaagggcttatccttttgtggcggatctagcttctcctcgccttcaggatgaaagctcagggggaaaccgaggagtcagaaaagctgagtaagatgagttctctcctggaacggctccatgcaaaatttaaccaaaatagaccctggagtgaaaccattaagcttgtgcgtcaagtcatggagaagagggttgtgatgagttctggagggcatcaacatttggtcagctgtttggagacattgcagaaggctctcaaagtaacatctttaccagcaatgactgatcgtttggagtccatagcaagacagaatggactgggctctcatctcagtgccagtggcactgaatgttacatcacgtcagatatgttctatgtggaagtgcagttagatcctgcaggacagctttgtgatgtaaaagtggctcaccatggggagaatcctgtgagctgtccggagcttgtacagcagctaagggaaaaaaattttgatgaattttctaagcaccttaagggccttgttaatctgtataaccttccaggggacaacaaactgaagactaaaatgtacttggctctccaatccttagaacaagatctttctaaaatggcaattatgtactggaaagcaactaatgctggtcccttggataagattcttcatggaagtgttggctatctcacaccaaggagtgggggtcatttaatgaacctgaagtactatgtctctccttctgacctactggatgacaagactgcatctcccatcattttgcatgagaataatgtttctcgatctttgggcatgaatgcatcagtgacaattgaaggaacatctgctgtgtacaaactcccaattgcaccattaattatggggtcacatccagttgacaataaatggaccccttccttctcctcaatcaccagtgccaacagtgttgatcttcctgcctgtttcttcttgaaatttccccagccaatcccagtatctagagcatttgttcagaaactgcagaactgcacaggaattccattgtttgaaactcaaccaacttatgcacccctgtatgaactgatcactcagtttgagctatcaaaggaccctgaccccatacctttgaatcacaacatgagattttatgctgctcttcctggtcagcagcactgctatttcctcaacaaggatgctcctcttccagatggccgaagtctacagggaacccttgttagcaaaatcacctttcagcaccctggccgagttcctcttatcctaaatctgatcagacaccaagtggcctataacaccctcattggaagctgtgtcaaaagaactattctgaaagaagattctcctgggcttctccaatttgaagtgtgtcctctctcagagtctcgtttcagcgtatcttttcagcaccctgtgaatgactccctggtgtgtgtggtaatggatgtgcaggactcaacacatgtgagctgtaaactctacaaagggctgtcggatgcactgatctgcacagatgacttcattgccaaagttgttcaaagatgtatgtccatccctgtgacgatgagggctattcggaggaaagctgaaaccattcaagccgacaccccagcactgtccctcattgcagagacagttgaagacatggtgaaaaagaacctgcccccggctagcagcccagggtatggcatgaccacaggcaacaacccaatgagtggtaccactacaccaaccaacacctttccggggggtcccattaccaccttgtttaatatgagcatgagcatcaaagatcggcatgagtcggtgggccatggggaggacttcagcaaggtgtctcagaacccaattcttaccagtttgttgcaaatcacagggaacggggggtctaccattggctcgagtccgacccctcctcatcacacgccgccacctgtctcttcgatggccggcaacaccaagaaccacccgatgctcatgaaccttcttaaagataatcctgcccaggatttctcaaccctttatggaagcagccctttagaaaggcagaactcctcttccggctcaccccgcatggaaatatgctcggggagcaacaagaccaagaaaaagaagtcatcaagattaccacctgagaaaccaaagcaccagactgaagatgactttcagagggagctattttcaatggatgttgactcacagaaccctatctttgatgtcaacatgacagctgacacgctggatacgccacacatcactccagctccaagccagtgtagcactcccccaacaacttacccacaaccagtacctcacccccaacccagtattcaaaggatggtccgactatccagttcagacagcattggcccagatgtaactgacatcctttcagacattgcagaagaagcttctaaacttcccagcactagtgatgattgcccagccattggcacccctcttcgagattcttcaagctctgggcattctcagagtaccctgtttgactctgatgtctttcaaactaacaataatgaaaatccatacactgatccagctgatcttattgcagatgctgctggaagccccagtagtgactctcctaccaatcatttttttcatgatggagtagatttcaatcctgatttattgaacagccagagccaaagtggttttggagaagaatattttgatgaaagcagccaaagtggggataatgatgatttcaaaggatttgcatctcaggcactaaatactttgggggtgccaatgcttggaggtgataatggggagaccaagtttaagggcaataaccaagccgacacagttgatttcagtattatttcagtagccggcaaagctttagctcctgcagatcttatggagcatcacagtggtagtcagggtcctttactgaccactggggacttagggaaagaaaagactcaaaagagggtaaaggaaggcaatggcaccagtaatagtactctctcggggcccggattagacagcaaaccagggaagcgcagtcggaccccttctaatgatgggaaaagcaaagataagcctccaaagcggaagaaggcagacactgagggaaagtctccatctcatagttcttctaacagaccttttaccccacctaccagtacaggtggatctaaatcgccaggcagtgcaggaagatctcagactcccccaggtgttgccacaccacccattcccaaaatcactattcagattcctaagggaacagtgatggtgggcaagccttcctctcacagtcagtataccagcagtggttctgtgtcttcctcaggcagcaaaagccaccatagccattcttcctcctcttcctcatctgcttccacctcagggaagatgaaaagcagtaaatcagaaggttcatcaagttccaagttaagtagcagtatgtattctagccaggggtcttctggatctagccagtccaaaaattcatcccagtctggggggaagccaggctcctctcccataaccaagcatggactgagcagtggctctagcagcaccaagatgaaacctcaaggaaagccatcatcacttatgaatccttctttaagtaaaccaaacatatccccttctcattcaaggccacctggaggctctgacaagcttgcctctccaatgaagcctgttcctggaactcctccatcctctaaagccaagtcccctatcagttcaggttctggtggttctcatatgtctggaactagttcaagctctggcatgaagtcatcttcagggttaggatcctcaggctcgttgtcccagaaaactcccccatcatctaattcctgtacggcatcttcctcctccttttcctcaagtggctcttccatgtcatcctctcagaaccagcatgggagttctaaaggaaaatctcccagcagaaacaagaagccgtccttgacagctgtcatagataaactgaagcatggggttgtcaccagtggccctgggggtgaagacccactggacggccagatgggggtgagcacaaattcttccagccatcctatgtcctccaaacataacatgtcaggaggagagtttcagggcaagcgtgagaaaagtgataaagacaaatcaaaggtttccacctccgggagttcagtggattcttctaagaagacctcagagtcaaaaaatgtggggagcacaggtgtggcaaaaattatcatcagtaagcatgatggaggctcccctagcattaaagccaaagtgactttgcagaaacctggggaaagtagtggagaagggcttaggcctcaaatggcttcttctaaaaactatggctctccactcatcagtggttccactccaaagcatgagcgtggctctcccagccatagtaagtcaccagcatataccccccagaatctggacagtgaaagtgagtcaggctcctccatagcagagaaatcttatcagaatagtcccagctcagacgatggtatccgaccacttccagaatacagcacagagaaacataagaagcacaaaaaggaaaagaagaaagtaaaagacaaagatagggaccgagaccgggacaaagaccgagacaagaaaaaatctcatagcatcaagccagagagttggtccaaatcacccatctcttcagaccagtccttgtctatgacaagtaacacaatcttatctgcagacagaccctcaaggctcagcccagactttatgattggggaggaagatgatgatcttatggatgtggccctgattgggaattaggaaccttatttcctaaaagaaacagggccagaggaaaaaaaactattgataagtttataggcaaaccaccataaggggtgagtcagacaggtctgatttggttaagaatcctaaatggcatggctttgacatcaagctgggtgaattagaaaggcatatccagaccctattaaagaaaccacagggtttgattctggttaccaggaagtcttctttgttcctgtgccagaaagaaagttaaaatacttgcttaagaaagggaggggggtgggaggggtgtagggagagggaagggagggaaacagttttgtgggaaatattcatatatattttcttctccctttttccatttttaggccatgttttaaactcattttagtgcatgtatatgaagggctgggcagaaaatgaaaaagcaatacattccttgatgcatttgcatgaaggttgttcaactttgtttgaggtagttgtccgtttgagtcatgggcaaatgaaggactttggtcattttggacacttaagtaatgtttggtgtctgtttcttaggagtgactgggggagggaagattattttagctatttatttgtaatattttaaccctttatctgtttgtttttatacagtgtttcgttctaaatctatgaggtttagggttcaaaatgatggaaggccgaagagcaaggcttatatggtggtagggagcttatagcttgtgctaatactgtagcatcaagcccaagcaaattagtcagagcccgcctttagagttaaatataatagaaaaaccaaaatgatatttttattttaggagggtttaaatagggttcagagatcataggaatattaggagttacctctctgtggaggtattgacttgtaatctcattttcctttcaaaaaaaaaaaaaaaagctaaggtggcttgttgggatgtaaacatgttttcagatgcagtaaggtttagtgtaggacagccttcctgacccagtggcatgaaaaccattacaggattaatagttctcctacttccacaatgtgccaaaagtctgcatcccagcattttgtttgcaggagaactgatgccattcctaagagctggactcactgtttctcttcatcacaaggagaaggagtccaaactttaatcactccactgtatgctccctgagataaaacagtaaaaaatccgcagccatagttcacttaaaacaatttcaagctcacttttgaagtaatgggggcctggaatgctaggtgagcatgaagataaacccttgctactatgtagcaacccaattggacctttttggagaaataggtctgagtctggattctgggggacatcaataagagcccttcacataaaaatatagaaatccaggagactgtttcgagtgcaacagaagttctcagtatttggagggtcctctcaaaaattctgcggccttactttgatattgacacctgcactgtgccattcctgattattccattcaggatctgtatcagcgggatggggcatggtccccagcacaactcttctgggttaaaaaaaaaaagccaggtgattcctttgtgtgttatgtcgtaagtggagtgacttcatcatatatggaagaagatttctatattcagctttttctgcaggttggagtcagcatagagttggaaaatcagctttggctttctttcctgtctcatttcctctagtgttctcctttttattgtcatcagctctcaacaactctgccacttttgtgtcccaaggtaataagatgtaggaaacaaaacattgtaaagtggagcaagaaaagttatcaattaaccacatcagagtcaaatgtcttgggtgacactaaggaggatatgggcaggtgataccagagtgctttatcttgtgatgttgatacagtagcagcctctcagacattcagccaggttggatttctcatgagtttgtcacctagttttgaatcctatcccgttggtttctgcaggaaaaaaaaaaaaatttatgtggtttttaaaatttgttctgagtggggagaatcttagggggaatgtactgaatagtatcatgggctcagctcccccatgcagggccaacaaataccaaaatgagtaaactgggaagcttttctctctttctgtcttcatcccagatcaaagaatcccgagttaggatctggatgaaggataagcccctgaattgtcgatgggctcacccccacactgacccagcatctgaacttgcttaacagggagccggggctaaactgcttcaccctgcctgagaaccagggagcactgcatttctccacagggtggaggagaagaggcagaataaaccaagcctgggacacctccctcctgtctaggtgtactcattcttctgtttcaaaagaaggcaaggacatgaagtcaacttctacctatcttctgctgctggtgtcttatgtattctcagtttgacctgattcctcttctgtcttttgacttaacattaggggttcttggtcataacctgctctgatgtacataaagatttcaggttcaatatcaatgtgtcttaaaacagaagtattttagcgggtggggggtggggtggtggggacaaacaacgcaggatataattgccaaaaccaggcttgaggttggtgactcttgaaagattttctttcttcaggcctagatcagaaaattaagtgcagcaatatcatgaattctcagaagccctttcagggagccagtgagtcatacagtatccacagttgagtcacttaaagatgtcagtatacgaaacattattcacaatccttgggcaatctcatttttttttccttctcccctcctcccctgccccccatacatttctatccttgagttagttttggaggggcaggaagtacttaacatctcagaagctagattgggaaacatgctcagctataagaactgagctttaaattttgagtttaaaaatgtacatcaggagcagctggggagggtctttttttaaaaaaatctttcaaatttggttttctgtgcatatggccgttttgtaaatactttggggtttttcatttttttgaaagtagatgaaatctgttgtgggatttttttcccgaaacattacaaaataacctgtttatttacatgcaaataaacttctttgataaaaagtaa

SEQ ID NO: 83 - protein, 2176 aa, Homo sapiens
MAAFGILSYEHRPLKRPRLGPPDVYPQDPKQKEDELTALNVKQGFNNQPAVSGDEHGSAKNVSFNPAKISSNFSSIIAEKLRCNTLPDTGRRKPQVNQKDNFWLVTARSQSAINTWFTDLAGTKPLTQLAKKVPIFSKKEEVFGYLAKYTVPVMRAAWLIKMTCAYYAAISETKVKKRHVDPFMEWTQIITKYLWEQLQKMAEYYRPGPAGSGGCGSTIGPLPHDVEVAIRQWDYTEKLAMFMFQDGMLDRHEFLTWVLECFEKIRPGEDELLKLLLPLLLRYSGEFVQSAYLSRRLAYFCTRRLALQLDGVSSHSSHVISAQSTSTLPTTPAPQPPTSSTPSTPFSDLLMCPQHRPLVFGLSCILQTILLCCPSALVWHYSLTDSRIKTGSPLDHLPIAPSNLPMPEGNSAFTQQVRAKLREIEQQIKERGQAVEVRWSFDKCQEATAGFTIGRVLHTLEVLDSHSFERSDFSNSLDSLCNRIFGLGPSKDGHEISSDDDAVVSLLCEWAVSCKRSGRHRAMVVAKLLEKRQAEIEAERCGESEAADEKGSIASGSLSAPSAPIFQDVLLQFLDTQAPMLTDPRSESERVEFFNLVLLFCELIRHDVFSHNMYTCTLISRGDLAFGAPGPRPPSPFDDPADDPEHKEAEGSSSSKLEDPGLSESMDIDPSSSVLFEDMEKPDFSLFSPTMPCEGKGSPSPEKPDVEKEVKPPPKEKIEGTLGVLYDQPRHVQYATHFPIPQEESCSHECNQRLVVLFGVGKQRDDARHAIKKITKDILKVLNRKGTAETDQLAPIVPLNPGDLTFLGGEDGQKRRRNRPEAFPTAEDIFAKFQHLSHYDQHQVTAQVSRNVLEQITSFALGMSYHLPLVQHVQFIFDLMEYSLSISGLIDFAIQLLNELSVVEAELLLKSSDLVGSYTTSLCLCIVAVLRHYHACLILNQDQMAQVFEGLCGVVKHGMNRSDGSSAERCILAYLYDLYTSCSHLKNKFGELFSDFCSKVKNTIYCNVEPSESNMRWAPEFMIDTLENPAAHTFTYTGLGKSLSENPANRYSFVCNALMHVCVGHHDPDRVNDIAILCAELTGYCKSLSAEWLGVLKALCCSSNNGTCGFNDLLCNVDVSDLSFHDSLATFVAILIARQCLLLEDLIRCAAIPSLLNAACSEQDSEPGARLTCRILLHLFKTPQLNPCQSDGNKPTVGIRSSCDRHLLAASQNRIVDGAVFAVLKAVFVLGDAELKGSGFTVTGGTEELPEEEGGGGSGGRRQGGRNISVETASLDVYAKYVLRSICQQEWVGERCLKSLCEDSNDLQDPVLSSAQAQRLMQLICYPHRLLDNEDGENPQRQRIKRILQNLDQWTMRQSSLELQLMIKQTPNNEMNSLLENIAKATIEVFQQSAETGSSSGSTASNMPSSSKTKPVLSSLERSGVWLVAPLIAKLPTSVQGHVLKAAGEELEKGQHLGSSSRKERDRQKQKSMSLLSQQPFLSLVLTCLKGQDEQREGLLTSLYSQVHQIVNNWRDDQYLDDCKPKQLMHEALKLRLNLVGGMFDTVQRSTQQTTEWAMLLLEIIISGTVDMQSNNELFTTVLDMLSVLINGTLAADMSSISQGSMEENKRAYMNLAKKLQKELGERQSDSLEKVRQLLPLPKQTRDVITCEPQGSLIDTKGNKIAGFDSIFKKEGLQVSTKQKISPWDLFEGLKPSAPLSWGWFGTVRVDRRVARGEEQQRLLLYHTHLRPRPRAYYLEPLPLPPEDEEPPAPTLLEPEKKAPEPPKTDKPGAAPPSTEERKKKSTKGKKRSQPATKTEDYGMGPGRSGPYGVTVPPDLLHHPNPGSITHLNYRQGSIGLYTQNQPLPAGGPRVDPYRPVRLPMQKLPTRPTYPGVLPTTMTGVMGLEPSSYKTSVYRQQQPAVPQGQRLRQQLQSQGMLGQSSVHQMTPSSSYGLQTSQGYTPYVSHVGLQQHTGPAGTMVPPSYSSQPYQSTHPSTNPTLVDPTRHLQQRPSGYVHQQAPTYGHGLTSTQRFSHQTLQQTPMISTMTPMSAQGVQAGVRSTAILPEQQQQQQQQQQQQQQQQQQQQQQQQQQYHIRQQQQQQILRQQQQQQQQQQQQQQQQQQQQQQQQQQHQQQQQQQAAPPQPQPQSQPQFQRQGLQQTQQQQQTAALVRQLQQQLSNTQPQPSTNIFGRY

SEQ ID NO: 84 - DNA, 6925 bp, Homo sapiens
  source 1..6925: mol_type = other DNA
agtttccggcaatggtcgagagtttctaacgtgcccccttgttgtctctcggccgccgtcctctcaaccaccgccccccttttcggctccctctcccccttcccgttcccccagtcagcctggccctgctggtgcctccggcgctacgggctgggcaagatggcggccttcgggatcttgagctacgaacaccggcccctgaagcggccgcggctggggcctcccgatgtttaccctcaggaccccaaacagaaggaggatgaactgacggccttgaatgtaaaacaaggtttcaataaccagcctgctgtctctggggatgagcatggcagtgccaagaacgtcagcttcaatcctgccaagatcagttccaacttcagcagcattattgcagagaaattacgttgtaatacccttcctgacactggtcgcaggaagccccaagtgaaccagaaggataacttctggctggtgactgcacgatcccagagtgccattaacacttggttcactgacttggctggcaccaagccactcacgcaactagccaaaaaggtccccattttcagtaagaaggaagaggtgtttgggtacttagccaaatacacagtgcctgtgatgcgggctgcctggctcattaagatgacctgtgcctactatgcagcaatctctgagaccaaggttaagaagagacatgttgaccctttcatggaatggactcagatcatcaccaagtacttatgggagcagttacagaagatggctgaatactaccggccagggcctgcaggaagtgggggctgtggttccacgatagggcccttgccccatgatgtagaggtggcaatccggcagtgggattacaccgagaagctggccatgttcatgtttcaggatggaatgctggacagacatgagttcctgacctgggtgcttgagtgttttgagaagatccgccctggagaggatgaattgcttaaactgctgctgcctctgcttctccgatactctggggaatttgttcagtctgcatacctgtcccgccggcttgcctacttctgtacacggagactggccctgcagctggatggtgtgagcagtcactcatctcatgttatatctgctcagtcaacaagcacgctacccaccacccctgctcctcagcccccaactagcagcacaccctcgactccctttagtgacctgcttatgtgccctcagcaccggcccctggtttttggcctcagctgtatcctacagaccatcctcctgtgctgtcctagtgccttggtttggcactactcactgactgatagcagaattaagaccggctcaccacttgaccacttgcctattgccccgtccaacctgcccatgccagagggtaacagtgccttcactcagcaggtccgtgcaaagttgcgggagatcgagcagcagatcaaggagcggggacaggcagttgaagttcgctggtctttcgataaatgccaggaagctactgcaggcttcaccattggacgggtacttcatactttggaagtgctggacagccatagttttgaacgctctgacttcagcaactctcttgactccctttgtaaccgaatctttggattgggacctagcaaggatgggcatgagatctcctcagatgatgatgctgtggtgtcattgctatgtgaatgggctgtcagctgcaagcgttctggtcggcatcgtgctatggtggtagccaagctcctggagaagagacaggcggagattgaggctgagcgttgtggagaatcagaagccgcagatgagaagggttccatcgcctctggctccctttctgctcccagtgctcccattttccaggatgtcctcctgcagtttctggatacacaggctcccatgctgacggaccctcgaagtgagagtgagcgggtggaattctttaacttagtactgctgttctgtgaactgattcgacatgatgttttctcccacaacatgtatacttgcactctcatctcccgaggggaccttgcctttggagcccctggtccccggcctccctctccctttgatgatcctgccgatgacccagagcacaaggaggctgaaggcagcagcagcagcaagctggaagatccagggctctcagaatctatggacattgaccctagttccagtgttctctttgaggacatggagaagcctgatttctcattgttctcccctactatgccctgtgaggggaagggcagtccatcccctgagaagccagatgtcgagaaggaggtgaagcccccacccaaggagaagattgaagggacccttggggttctttacgaccagccacgacacgtgcagtacgccacccattttcccatcccccaggaggagtcatgcagccatgagtgcaaccagcggttggtcgtactgtttggggtgggaaagcagcgagatgatgcccgccatgccatcaagaaaatcaccaaggatatcttgaaggttctgaaccgcaaagggacagcagaaactgaccagcttgctcctattgtgcctctgaatcctggagacctgacattcttaggtggggaggatgggcagaagcggcgacgcaaccggcctgaagccttccccactgctgaagatatctttgctaagttccagcacctttcacattatgaccaacaccaggtcacggctcaggtctcccggaatgttctggagcagatcacgagctttgcccttggcatgtcataccacttgcctctggtgcagcatgtgcagttcatcttcgacctcatggaatattcactcagcatcagtggcctcatcgactttgccattcagctgctgaatgaactgagtgtagttgaggctgagctgcttctcaaatcctcggatctggtgggcagctacactactagcctgtgcctgtgcatcgtggctgtcctgcggcactatcatgcctgcctcatcctcaaccaggaccagatggcacaggtctttgaggggctgtgtggcgtcgtgaagcatgggatgaaccggtccgatggctcctctgcagagcgctgtatccttgcttatctctatgatctgtacacctcctgtagccatttaaagaacaaatttggggagctcttcagcgacttttgctcaaaggtgaagaacaccatctactgcaacgtggagccatcggaatcaaatatgcgctgggcacctgagttcatgatcgacactctagagaaccctgcagctcacaccttcacctacacggggctaggcaagagtcttagtgagaaccctgctaaccgctacagctttgtctgcaatgcccttatgcacgtctgtgtggggcaccatgatcccgatagggtgaatgacatcgcaatcctgtgtgcagagctgaccggctattgcaagtcactgagtgcagaatggctaggagtgcttaaggccttgtgctgctcctctaacaatggcacttgtggtttcaacgatctcctctgcaatgttgatgtcagtgacctatcttttcatgactcgctggctacttttgttgccatcctcatcgctcggcagtgtttgctcctggaagatctgattcgctgtgctgccatcccttcactccttaatgctgcttgtagtgaacaggactctgagccaggggcccggcttacctgccgcatcctccttcaccttttcaagacaccgcagctcaatccttgccagtctgatggaaacaagcctacagtaggaatccgctcctcctgcgaccgccacctgctggctgcctcccagaaccgcatcgtggatggagccgtgtttgctgttctcaaggctgtgtttgtacttggggatgcggaactgaaaggttcaggcttcactgtgacaggaggaacagaagaacttccagaggaggagggaggaggtggcagtggtggtcggaggcagggtggccgcaacatctctgtggagacagccagtctggatgtctatgccaagtacgtgctgcgcagcatctgccaacaggaatgggtaggagaacgttgccttaagtctctgtgtgaggacagcaatgacctgcaagacccagtgttgagtagtgcccaggcgcagcgcctcatgcagctcatttgctatccacatcgactgctggacaatgaggatggggaaaacccccagcggcagcgcataaagcgcattctccagaacttggaccagtggaccatgcgccagtcttccttggagctgcagctcatgatcaagcagacccctaacaatgagatgaactccctcttggagaacatcgccaaggccacaatcgaggttttccaacagtcagcagagacagggtcatcttctggaagtactgcaagcaacatgcccagcagcagcaagaccaagcctgtgctcagctctctagagcgctctggtgtatggctggtggcccccctcattgctaaactgcccacctcagtccagggacatgtgttaaaggctgctggggaagaattggagaagggtcagcacctgggttcctcttcacgcaaagaacgtgatcgacaaaagcagaagagcatgtccctattgagccagcagcccttcttatcgctggtgctaacatgtctgaaagggcaggatgaacaacgcgagggactccttacctccctctacagccaggtgcaccagattgtgaataattggcgagatgaccagtacttagatgattgcaaaccaaagcagcttatgcatgaggcactcaaactgcggctcaacctggtggggggcatgtttgacacggtgcagcgcagcacccagcagaccacggagtgggccatgctcctcctggagatcatcatcagcggcactgtcgacatgcagtccaacaatgagctcttcactactgtgttggacatgctgagcgtgctcatcaatgggacattggctgcagacatgtctagcatctcgcaaggtagcatggaggaaaacaagcgtgcatacatgaacctggcgaagaagttgcagaaggagttgggggagcgccagtcagacagtctggaaaaggttcgccagctgctgccactgcccaagcagacccgagatgtcatcacgtgtgagccacagggctcccttatcgataccaagggcaacaagattgctggcttcgattccatcttcaagaaggagggtctacaggtttccaccaaacagaagatctcgccctgggatctttttgaggggttgaagccgtcagcaccactctcttggggctggtttggaacagtccgagtggaccggcgagtggctcgaggagaggagcagcagcggttgctgctctaccacacacacctgaggccccggccccgcgcctattacctggagccactgccactgcccccagaagatgaggagccgcctgctcctaccctgctagagcctgagaaaaaggctccagagccccccaaaactgacaaaccgggggctgctccacccagtactgaggaacgcaagaagaagtccaccaagggcaagaaacgcagccagccagctaccaagacagaggactatggaatgggcccgggtcggagcggcccttatggtgtgacagtgcctccggacctcctgcaccacccaaaccctggttctataacacaccttaactacaggcaaggctccataggcctgtacacccagaaccagccactacctgcaggtggccctcgtgtggacccataccgtcctgtgcgcttaccaatgcagaagctgcccacccgaccaacttaccctggagtgctgcccacaaccatgactggcgtcatgggtttagaaccctcctcttataagacctctgtgtaccggcagcagcaacctgcggtgccccaaggacagcgccttcgccaacagctccagcagagtcagggcatgttgggacagtcatctgtccatcagatgactcccagctcttcctacggtttgcagacttcccagggctatactccttatgtttctcatgtgggattgcagcaacacacaggccctgcaggtaccatggtgccccccagctactccagccagccttaccagagcacccacccttctaccaatcctactcttgtagatcctacccgccacctgcaacagcggcccagtggctatgtgcaccagcaggcccccacctatggacatggactgacctccactcaaaggttttcacaccagacactgcagcagacacccatgataagtaccatgactccaatgagtgcccagggcgtccaggcaggcgtccgttcaacagccatcctacctgagcagcagcagcagcagcaacagcagcaacagcaacagcagcagcagcagcaacagcaacagcagcagcagcagcagcagtaccacatccggcagcagcagcagcagcagatcctgcggcagcagcagcaacagcaacagcagcagcagcagcagcagcaacagcaacagcagcagcagcaacagcaacaacagcaacaccagcagcaacagcagcaacaggcggctcctccccaaccccagccccagtcccagccccagttccagcgccaggggcttcagcagacccagcagcagcaacagacagcagctttggtccggcaacttcaacaacagctctctaatacccagccacagcccagtaccaacatatttggacgctactgagccacctggaggaactgcttgtgcactggatgtggccccaccctttcctcttaattcccaatcccattcctgggctagcaccagtagtggttggggccctcccctcaggctccatttttaataagtttttagtatttttgttaatgtgaggcattgagctgttgggttttgtatattatttatatagagaccccagagctgttgcacccaatacacagagcttctttgcaaa

SEQ ID NO: 85 - protein, 2174 aa, Homo sapiens
MSASFVPNGASLEDCHCNLFCLADLTGIKWKKYVWQGPTSAPILFPVTEEDPILSSFSRCLKADVLGVWRRDQRPGRRELWIFWWGEDPSFADLIHHDLSEEEDGVWENGLSYECRTLLFKAVHNLLERCLMNRNFVRIGKWFVKPYEKDEKPINKSEHLSCSFTFFLHGDSNVCTSVEINQHQPVYLLSEEHITLAQQSNSPFQVILCPFGLNGTLTGQAFKMSDSATKKLIGEWKQFYPISCCLKEMSEEKQEDMDWEDDSLAAVEVLVAGVRMIYPACFVLVPQSDIPTPSPVGSTHCSSSCLGVHQVPASTRDPAMSSVTLTPPTSPEEVQTVDPQSVQKWVKFSSVSDGFNSDSTSHHGGKIPRKLANHVVDRVWQECNMNRAQNKRKYSASSGGLCEEATAAKVASWDFVEATQRTNCSCLRHKNLKSRNAGQQGQAPSLGQQQQILPKHKTNEKQEKSEKPQKRPLTPFHHRVSVSDDVGMDADSASQRLVISAPDSQVRFSNIRTNDVAKTPQMHGTEMANSPQPPPLSPHPCDVVDEGVTKTPSTPQSQHFYQMPTPDPLVPSKPMEDRIDSLSQSFPPQYQEAVEPTVYVGTAVNLEEDEANIAWKYYKFPKKKDVEFLPPQLPSDKFKDDPVGPFGQESVTSVTELMVQCKKPLKVSDELVQQYQIKNQCLSAIASDAEQEPKIDPYAFVEGDEEFLFPDKKDRQNSEREAGKKHKVEDGTSSVTVLSHEEDAMSLFSPSIKQDAPRPTSHARPPSTSLIYDSDLAVSYTDLDNLFNSDEDELTPGSKKSANGSDDKASCKESKTGNLDPLSCISTADLHKMYPTPPSLEQHIMGFSPMNMNNKEYGSMDTTPGGTVLEGNSSSIGAQFKIEVDEGFCSPKPSEIKDFSYVYKPENCQILVGCSMFAPLKTLPSQYLPPIKLPEECIYRQSWTVGKLELLSSGPSMPFIKEGDGSNMDQEYGTAYTPQTHTSFGMPPSSAPPSNSGAGILPSPSTPRFPTPRTPRTPRTPRGAGGPASAQGSVKYENSDLYSPASTPSTCRPLNSVEPATVPSIPEAHSLYVNLILSESVMNLFKDCNFDSCCICVCNMNIKGADVGVYIPDPTQEAQYRCTCGFSAVMNRKFGNNSGLFLEDELDIIGRNTDCGKEAEKRFEALRATSAEHVNGGLKESEKLSDDLILLLQDQCTNLFSPFGAADQDPFPKSGVISNWVRVEERDCCNDCYLALEHGRQFMDNMSGGKVDEALVKSSCLHPWSKRNDVSMQCSQDILRMLLSLQPVLQDAIQKKRTVRPWGVQGPLTWQQFHKMAGRGSYGTDESPEPLPIPTFLLGYDYDYLVLSPFALPYWERLMLEPYGSQRDIAYVVLCPENEALLNGAKSFFRDLTAIYESCRLGQHRPVSRLLTDGIMRVGSTASKKLSEKLVAEWFSQAADGNNEAFSKLKLYAQVCRYDLGPYLASLPLDSSLLSQPNLVAPTSQSLITPPQMTNTGNANTPSATLASAASSTMTVTSGVAISTSVATANSTLTTASTSSSSSSNLNSGVSSNKLPSFPPFGSMNSNAAGSMSTQANTVQSGQLGGQQTSALQTAGISGESSSLPTQPHPDVSESTMDRDKVGIPTDGDSHAVTYPPAIVVYIIDPFTYENTDESTNSSSVWTLGLLRCFLEMVQTLPPHIKSTVSVQIIPCQYLLQPVKHEDREIYPQHLKSLAFSAFTQCRRPLPTSTNVKTLTGFGPGLAMETALRSPDRPECIRLYAPPFILAPVKDKQTELGETFGEAGQKYNVLFVGYCLSHDQRWILASCTDLYGELLETCIINIDVPNRARRKKSSARKFGLQKLWEWCLGLVQMSSLPWRVVIGRLGRIGHGELKDWSCLLSRRNLQSLSKRLKDMCRMCGISAADSPSILSACLVAMEPQGSFVIMPDSVSTGSVFGRSTTLNMQTSQLNTPQDTSCTHILVFPTSASVQVASATYTTENLDLAFNPNNDGADGMGIFDLLDTGDDLDPDIINILPASPTGSPVHSPGSHYPHGGDAGKGQSTDRLLSTEPHEEVPNILQQPLALGYFVSTAKAGPLPDWFWSACPQAQYQCPLFLKASLHLHVPSVQSDELLHSKHSHPLDSNQTSDVLRFVLEQYNALSWLTCDPATQDRRSCLPIHFVVLNQLYNFIMNML

SEQ ID NO: 86 - DNA, 10461 bp, Homo sapiens
  source 1..10461: mol_type = other DNA
ctctctctggtcggaggcggcggtaatggcggatggtgggttgtggcgccggcggcggctgctgtgagggacgatgagtgcctccttcgtgccgaacggggccagcctggaagattgtcactgtaacctcttctgcctggctgacttgacaggaattaagtggaaaaaatatgtatggcaaggcccaacttctgcccctattctgtttcctgtgacagaagaagaccccattttgagcagttttagtcgctgccttaaggcagatgtacttggtgtttggcggcgagatcaaagacctggaagaagagaattgtggatattttggtggggtgaagaccccagttttgctgaccttattcaccatgacttatcagaagaagaagatggagtgtgggagaatggactttcctatgaatgccgtactctgcttttcaaagcagttcacaatctattggaacggtgtttaatgaacaggaattttgtacgtattggcaagtggtttgtaaagccttatgaaaaagatgaaaaacctataaataaaagtgaacacttgtcctgctccttcacctttttcttgcatggagacagcaatgtttgtaccagtgtggaaattaaccaacatcaacctgtataccttctcagtgaagagcatatcacccttgctcaacagtctaatagcccatttcaagttatcttatgcccatttggactaaatggcactctcacaggacaggcattcaagatgtctgattcagctacaaaaaaattaattggtgaatggaaacagttctatcctatctcatgttgcttgaaggagatgtctgaagaaaaacaggaagatatggattgggaagatgattctttagctgcagtagaagttcttgttgctggtgtccgaatgatctacccagcatgctttgttctagtccctcagtcagacattcctactcctagccctgtgggatccactcactgttcatcttcttgcttgggtgtccaccaagtgcctgcttccacaagagatcctgctatgtcttcggttacgcttacaccacctacgtctcctgaggaagtccaaacagttgatcctcagtctgtccagaagtgggtcaaattttcttcagtatctgatggcttcaactccgatagtactagccaccatggtgggaaaatacccagaaaattagcaaatcatgtggtggatagagtttggcaagaatgcaatatgaacagagcacagaacaagaggaagtattctgcttcatcaggtggtctatgcgaagaagcgacagctgctaaagtggcatcctgggattttgttgaagccacacaaagaacaaattgcagttgtttgaggcacaaaaatctcaagtcaagaaatgctggacaacaaggacaggcaccatctttaggtcagcaacaacaaatacttcctaagcacaagaccaatgagaagcaagaaaagagtgaaaagccacagaaacgccccttgactccttttcaccatcgtgtgtctgttagtgatgatgttggcatggacgcagattcagccagccaaagacttgtgatctctgctccagacagtcaagtgagattttcaaatatccgaactaatgatgtagcaaagactcctcagatgcatggcaccgaaatggcaaattcacctcaaccacccccacttagtcctcacccttgtgatgtggttgatgaaggagtgactaaaacaccttcaactcctcagagtcaacatttttatcaaatgccaacaccagatcccttggttccttctaaaccaatggaagataggatagacagtttgtcccagtctttcccacctcaatatcaggaagctgtagaacctacagtatatgttggtacagcagtaaacttggaagaagatgaagccaatatagcctggaagtattacaagttcccaaagaaaaaagatgtagagtttttaccacctcaacttccaagtgataaattcaaggatgatccagttggaccttttggacaggaaagtgtaacatcagttacagagttaatggtgcaatgtaagaaacctttaaaagtttctgatgaattagtgcagcaatatcaaattaaaaaccagtgtctttcagcaatagcatctgatgcagaacaagaacctaaaattgatccatatgcatttgttgaaggagatgaggaattcctttttcctgataaaaaagatagacaaaatagtgagagagaagctggaaaaaaacacaaggtagaagatgggacatctagtgtaacagtgttatcacatgaagaagatgctatgtcattatttagtccctctatcaagcaagatgctccacgccctactagtcatgcccgtcctccatcaacaagtttgatttatgactcagacctggctgtctcttatactgaccttgataatctcttcaattctgatgaagatgaactaacacctggatctaaaaaatcagcaaatggatcagatgataaagccagctgcaaggaatcaaagacaggaaatctggacccgttatcttgcataagcactgcagatcttcataaaatgtatcctacaccaccatcattggaacaacatattatgggattttccccaatgaatatgaataataaagaatatggtagtatggatacaacacctggaggaactgttctagaaggaaatagttctagtataggagcgcagttcaaaattgaggttgatgagggattctgtagccccaaaccttctgaaattaaagatttttcttatgtctataagcctgaaaattgtcaaattctagtgggatgttccatgtttgcacctctaaaaactctaccaagccaatatctgccccctatcaaattgccagaagagtgtatttaccgtcagagttggactgttggaaaattggaattgctttcttcagggccttcaatgccattcatcaaagagggtgatggaagtaatatggatcaagaatatggcactgcttatacacctcaaactcatacttcttttgggatgcctcctagcagtgcacctcctagtaacagcggagcaggaattcttccttctccatccacccctcggtttccaactccaaggactccaaggactcctcggactcctcgtggagctggtggacctgctagtgctcaaggttcagtcaaatatgaaaattcagacttgtattcaccagcttctaccccatctacatgcagaccccttaattctgttgaacctgcaactgtcccttccatccctgaagcacacagtctttatgtaaacctcatcctttcagaatcagttatgaatttgtttaaagactgtaactttgatagttgttgcatctgtgtttgcaacatgaacatcaagggtgccgatgttggagtttacattccagatccaacgcaggaagcacaatataggtgtacctgtggcttcagtgctgtcatgaacagaaaatttggaaacaattcaggattatttcttgaagatgaactagatatcataggacgcaatacagactgtggcaaagaagcagaaaaacgttttgaagctctcagggctacctctgctgaacatgttaatggaggactaaaggaatctgaaaaattatctgatgatttgatattattgctacaagatcagtgcactaatttattttcaccctttggagcagcagaccaagatccttttcctaaaagtggtgtaattagcaattgggtacgtgttgaagagcgtgactgttgcaatgactgctaccttgcattagaacatgggcgtcagttcatggataacatgtcaggaggaaaagttgatgaagcacttgtgaaaagttcatgcttacacccctggtccaaaagaaacgatgtgagtatgcagtgctcacaggatatacttcgaatgctcctctctcttcagccagttcttcaggatgccattcagaaaaaaagaacagtaagaccttggggtgttcagggtcctctcacttggcaacaatttcataaaatggctggccgaggctcttatggaactgatgaatccccagaaccactgccaatccccacatttttgttgggttatgattatgattatctggtgctttctccatttgctcttccttattgggagagacttatgctggaaccctatggatctcaaagagatatagcctatgttgtactgtgtccagaaaatgaagccttgttaaatggagcaaaaagcttttttagagatcttactgcaatatatgagtcctgtcgattaggtcaacatagacctgtttctcgactgttaacagatgggatcatgagagttggatctactgcatcaaagaaactatcagaaaagttggtagcagaatggttttctcaggcagctgacggtaacaatgaagcattttctaaactcaagctttatgcacaagtctgcagatatgacctaggtccttatcttgcttccctgccattggacagctctctactttcccagccaaatttagttgcccctacaagtcagtctttgattactccacctcagatgacaaatactggaaatgctaatactccatctgccaccttagcatctgcagcgagcagcactatgacagtgacttcaggtgttgccatatctacttcagttgccacagctaattcaactttgaccacagcttcaacttcatcttcatcatcctccaacttgaatagtggagtatcatcaaataaactaccttcgtttccaccctttggcagtatgaacagtaatgctgcaggatccatgtctacacaagcaaatacagttcagagtggtcagctaggagggcaacagacatcagctctacagacagctgggatttctggagaatcatcttcacttcccactcagccgcatcctgatgtgtctgaaagcacgatggatcgggataaagtgggaatccccacagatggtgattcacatgcagtcacgtatccacctgcaattgttgtttatataattgatccttttacatacgaaaatacagacgagagcactaactcttctagtgtgtggacattggggctacttcgatgctttctagaaatggtccagactcttcctcctcatatcaagagtactgtttctgtacagattattccttgtcagtacctgttgcaacctgtgaagcatgaagatagagaaatctatccccagcatttaaaatccctggctttttcggcctttacccagtgtcggaggccacttccaacatcaaccaatgtgaaaacattgactggctttggtccaggtttagccatggaaactgcccttagaagtcctgatagaccagagtgtattcgactttatgcacctccttttattctggctccagtgaaggacaaacagacagagctaggagaaacatttggagaagctggacagaaatataatgttctttttgtgggatactgtttatcacatgatcaaaggtggattcttgcatcttgcacagatctatatggagaacttttagaaacttgtatcattaacatcgatgttccaaatagggctcgtcggaaaaaaagttctgctagaaaatttggtctacagaaactttgggagtggtgcttaggacttgtacaaatgagttcattgccatggagagttgtaattggtcgtctaggaaggattggtcatggagaattgaaagattggagctgtttgctgagtcgtcgaaacttgcagtctctaagtaaaaggctcaaagacatgtgtagaatgtgtggtatatctgctgcagactcccctagcattctcagtgcttgcttggtggcaatggagccgcaaggctcttttgttattatgccagattctgtgtcaactggttctgtatttggaagaagcacgactctaaatatgcagacatctcagctaaataccccacaggatacatcatgtactcatatacttgtgtttcctacttctgcttctgtgcaagtagcttcagctacttataccactgaaaatttggatttagctttcaatcccaacaatgatggagcagatggaatgggtatctttgatttgttagacacaggagatgatcttgaccctgatatcattaatatccttcctgcttctccaactggttctcctgtacattctccaggatctcattacccccatggaggtgatgcgggcaagggtcagagtactgatcggctactatcaacagaacctcatgaggaagtacctaatattcttcagcaaccattggcccttggttactttgtatcaactgccaaagcaggtccattacctgactggttctggtcagcatgtcctcaagcacaatatcagtgtcccctttttcttaaggcctctttgcacctccacgtgccttcagtgcaatctgacgagctgcttcacagtaaacactcccacccacttgactcaaatcagacttcagatgtcctcaggtttgttttggaacagtacaatgcactctcctggctaacctgtgaccctgcaacccaggacagacgctcatgtctcccaattcattttgtggtgctgaatcagttatataactttattatgaatatgctgtgatcttcatttgatggaactgtgcaagaaaagaacaaggaaaaatggatgtttcgctgcaggattaagttacaattatcttctcagtgaaggtcatttgtgatggggtctaattcttattacttcaacaaatattgttttgacttggggggaggggctataaccctgctatttttcattgactctattgaactctttaggatgatgactgatcatacaaaacgtattataacattttcgtagcaaaattaaccttttttttttccagtcacagtatttgtgaaaagtaatgagccatagtacccagtcatgttaaatgaatattaaaagcatggagaggaaacatgaggaacaatgaatttcaacatatggcttcagaacatgaagatgttcttgtatggattatagtatctagtattcaaaaatgcctgcatctcttctcttatttattgtaagtttttaaatgtataaattgtcttatatttcttaacctcttttataaaaattttcctagaaggtttatactgccttcttgctttaaagcaattggtctaaaatatatgtaatcgtcttaattaaaaagttgcagtagggttgcttttagagtattatttttttgtaagggggtgggtgggacagtaaatttgtattgtctcgatgtacagtttaacggggatagagggggaataatgtccataccattgtgtgtggaggatttacagctaagctgtagttgcagagtacatgtacagtaatgaagttcactgtgtttataaattgaaaaggtaccaggtcttacagcattttatatatcacatctttacagaataacatgatggcaatatacaagtggtattgttaggtggtttaacttagaataaaatgagaattcttcagttatattttgtactatggtttagggctatgactaatatttcaggccatttccggtgaaagaaacttagttttacaagaaaaaccatttgctactgaatgcttaaactaattttagtgtttaatgttacatgcttaaatttttttcagttttaacagtggcatatttaggcatggaaatattattatgaaatttattttcaggatctgctataaggttgaaatttagcccagctctaggcattttacaaattatttttcaagcagtcattcttgattgtttgacttttttttttaaattaaagattgggaatgtatgtgagagtatgcatatgtatgggtgtgtgtgtgtgcgcgcaatcaaactgtggtgtaaatagattctcagtgaattctggtattcagactctattccactagtgaaagaaccattttttaaacttcccttgccttttttatttatttaattttcttggtttggagatgtcagtcccaaacaccagagtctgtacttttctataacacagctcagattaaggtagggcatatgccaaggaggttctcacctccctaaagaagggacttgaattttagggactttaattcacccctccttcaatacaactttcccccttcttgtttgcacatgccaagataactgcttttatgcaggctgtacccccttgaaaaatcctttctacagtgctgctcacaaaagagcccaagttcgcctcctacctgcattgctgacttgaattcacagtcgccgagtctacctagctttcttggaagcagtctagcaaaatttctatttgtacgttcactaattatctacaaggacaaaatcagttgtatttacaaaactctacttcagtgtttgttttagtttttttttttactgaaacttgtttttgtgaatactctgtgcttagaattaaatatcactttcttatgaacaacataacttcttcagattgtgtatatgaaaacattagcaagtcttgttttttctatgaagcaaacacaattggtgacaaaggttgtcaatcatttcttcaaaattataatgcagttctaatggtcagcatattttgatattaaatttaaagatcacctctctgcatttgtttttaaattatgctaatacaccacacattatgttggtatgttttgttctgtactttctttaaaaaaaaaaaaaaaacttgtctgagatttgaaggaaaatgtgcttatttggaatttccataaaaagagtatcctttttatacacttaatagtgactttacaaaataaaagttatattctcagttgtttaaaatcactaacctatgataaccacacctcaatttgaaagtagatttaaaattattccctgacaggttatttaatatggagccataaggagggaacccagtacacaattattttttatttgggaatcagggaatagttcccaaatatacaggatttattgataagattttttttcttcccttcatatatccattcaaactcaatggaaagttattaaataaccattagaaaagctcagtagacttatttgagaaattaagccttgtgcaggatgatggatttgacttactaatgtactgtcacagacaaatatgggtagttttgtttaaataggtaagcaaaatattatactttatagcagtggattaccaacaccttgacttctttgttacagtgctaacatctttttttttgtgcaggtatccatgattattaagcagggtggaagttcagtattttgtcatttaaaaagattagttatataatgtctgcttccagccagtgagaaacatctagccatacctttcttatgcaagccattgagttatcaggactgtgaattaacactgtatgaataaatttctgtacaccttattgtttggccagaaggccaccaagtgtacttatatgtaatccttaaattttaaagtagctgtaatttttaaatatttctaaacttttcttaaaccactaaaattaagctcttactacttagtcaactatcctcagctgtattcgtactcaattgtcagtatggcacagattactgtattaaaatattctcctttcgtcttcatatttaccttctgaggtaattttttaacttaatgtgttactacaaagatttgcagatctttaatcaagcactatgttaatactgtaatatcagaatactatgttgcattatttaaaatgttcaaattgaatagattaaaaagtttttaaatgctattgcatcatataatttgctattcatccactatggcattgcatatcaatcagttaatacacttaatgttgcatgagtgatattttggtctgggtttcctcttaagattttagtttgtctgaattaaggaaaaatgtttttaatatacattcttattttgtcccacccctccagaaataagctggaaatcttaactttttggggggtcttttttggtgttttaatgggcccagaactgtggtttaaatttttatgtatgtattttcttttttgtggagtataaatttaaaaactggatttgggacctaaaatactcctcaggttgatgtattcatgaagttttaaaacatctttagttttcaaagtaaactggatatgtggaccttaaagttattgagtttaagctacaaattgtaacgtcattactggacatgtcagcatcaaccctctcaaaatagcttggtcactttatgaaggggcgttttaaagttgttgtttagcagtgacatttaatatggtccaattgcttttctttttaacgtgacaaaaagagaataaggaacaaacactattgctgccgaatgccataacactgagttgtacaaattgtgattgaggaaatgaaaaggtttatactttttaaaaaaaaaaaaacaaaaacaaaaaacaaaacttcaaatggaataaattattcatgaagccttca

SEQ ID NO: 87 - protein, 1320 aa, Homo sapiens
MFGLDQFEPQVNSRNAGQGERNFNETGLSMNTHFKAPAFHTGGPPGPVDPAMSALGEPPILGMNMEPYGFHARGHSELHAGGLQAQPVHGFFGGQQPHHGHPGSHHPHQHHPHFGGNFGGPDPGASCLHGGRLLGYGGAAGGLGSQPPFAEGYEHMAESQGPESFGPQRPGNLPDFHSSGASSHAVPAPCLPLDQSPNRAASFHGLPSSSGSDSHSLEPRRVTNQGAVDSLEYNYPGEAPSGHFDMFSPSDSEGQLPHYAAGRQVPGGAFPGASAMPRAAGMVGLSKMHAQPPQQQPQQQQQPQQQQQQHGVFFERFSGARKMPVGLEPSVGSRHPLMQPPQQAPPPPQQQPPQQPPQQQPPPPPGLLVRQNSCPPALPRPQQGEAGTPSGGLQDGGPMLPSQHAQFEYPIHRLENRSMHPYSEPVFSMQHPPPQQAPNQRLQHFDAPPYMNVAKRPRFDFPGSAGVDRCASWNGSMHNGALDNHLSPSAYPGLPGEFTPPVPDSFPSGPPLQHPAPDHQSLQQQQQQQQQQQQQQQQQQQQQQQQQQQQRQNAALMIKQMASRNQQQRLRQPNLAQLGHPGDVGQGGLVHGGPVGGLAQPNFEREGGSTGAGRLGTFEQQAPHLAQESAWFSGPHPPPGDLLPRRMGGSGLPADCGPHDPSLAPPPPPGGSGVLFRGPLQEPMRMPGEGHVPALPSPGLQFGGSLGGLGQLQSPGAGVGLPSAASERRPPPPDFATSALGGQPGFPFGAAGRQSTPHSGPGVNSPPSAGGGGGSSGGGGGGGAYPPQPDFQPSQRTSASKLGALSLGSFNKPSSKDNLFGQSCLAALSTACQNMIASLGAPNLNVTFNKKNPPEGKRKLSQNETDGAAVAGNPGSDYFPGGTAPGAPGPGGPSGTSSSGSKASGPPNPPAQGDGTSLSPNYTLESTSGNDGKPVSGGGGRGRGRRKRDSGHVSPGTFFDKYSAAPDSGGAPGVSPGQQQASGAAVGGSSAGETRGAPTPHEKALTSPSWGKGAELLLGDQPDLIGSLDGGAKSDSSSPNVGEFASDEVSTSYANEDEVSSSSDNPQALVKASRSPLVTGSPKLPPRGVGAGEHGPKAPPPALGLGIMSNSTSTPDSYGGGGGPGHPGTPGLEQVRTPTSSSGAPPPDEIHPLEILQAQIQLQRQQFSISEDQPLGLKGGKKGECAVGASGAQNGDSELGSCCSEAVKSAMSTIDLDSLMAEHSAAWYMPADKALVDSADDDKTLAPWEKAKPQNPNSKEAHDLPANKASASQPGSHLQCLSVHCTDDVGDAKARASVPTWRSLHSDISNRFGTFVAALT

SEQ ID NO: 88 - DNA, 7814 bp, Homo sapiens
  source 1..7814: mol_type = other DNA
gttgctgcttctcccggcgctgggcgagaggcagacacagagaggggagccgagaccctcggaacgccccacgcagagcccccccgctagtcgggagaggggtgcgcagaccccccagagctgcccccgcgcccccctccccccattccgggctctgagagcgcagcgggaacgccttagcctgctcgcccggcgtggccccccgacccgcgtacgcccccctccctcaggtccgagagggactcgcgaagcacctcagcgcggaggcagggaaccggagccttggagcgacccaacccctcgtctcgctgccctcccgcgcctgcaacggtgcgcggagactccggcgaactcagacacccaacggcggagaacagaagcggcaggcggcggacgtggccgcgaagctgcgcgccgaacgcagcgcacccgctgccgagcagaggagccgcgcctttccccgaccctcggctccagcccccggcgcctgccgcctcgcagcccctctgcgtcctcggctcgggggccggcaccggcgatgccgagcggagcctccagtcctccgacccgctgaagaagcagcagccgctcgcccggagcctacggggattgtgcgagcggatcgtgctcggtggaggctcgggctgcggggcgcggggactccggggggcggggggagggaccgctctgtcggtgcccggcgccagccgcggctttgaagggtctccctcccctgcccttagcagctctgccacggactccgggaggctgcgggcggcgtcctgagggctccccagcagacccaatcggacttgagaaggtgatcgctctgctctcccaacccccttccctccccattccccccacttaactttttgtctccgttcatccgcggcttcgtcccctccccgcagacccacccgcggctgtgacaaccgcccggggcatgggccccccaacacggctcctagaggccccgcggcctcgcaagatgtgagaggccctccccgggcagaatcggagcttcaggagaggagctaataccccgccccccgtccctcacatcaggcggggtggaggtgcgcgctgagcccccgcggtgctgagcgtcccggagcgcccaatcctgggctggaacgagtagctggccggaggcgcgccgcggagagccggctgtcatgccctattgatccccctctgccccccgccaagtatgtttgggctggaccaattcgagccccaggtcaacagcaggaacgctggccagggcgagaggaactttaacgagaccggactgagcatgaacacccactttaaggccccggctttccacactggggggccccctggccctgtggatcctgctatgagcgcgctgggcgaacccccgatcttgggcatgaacatggagccctacggcttccacgcgcgcggccactcggagttgcacgcaggggggctgcaagcgcagcctgtgcacggcttctttggcggccagcagcctcaccacggccacccgggaagtcatcatccccaccagcatcacccccactttgggggcaacttcggtggcccggaccccggggcctcgtgcctgcacgggggtcgcctgctcggctacggcggcgcagccggaggcctgggcagccagccgcccttcgccgagggctatgagcacatggcggagagccaggggcctgagagcttcggcccgcagcgaccggggaacctcccggacttccacagttcaggtgcctccagccacgccgtgccggccccatgcctgccgctggaccagagccctaaccgagccgcctccttccacggcctgccgtcctccagcggctccgattcccacagtctggagccacggagggtgacgaaccaaggagccgtcgactcgctggaatacaattacccgggcgaggcgccctcgggacattttgacatgttttcgccctctgactccgaagggcagctgcctcattatgcagcgggtcgccaggttcctgggggcgctttcccgggcgcctcggccatgcccagagctgcgggcatggtgggcttgtccaaaatgcacgcccagccaccgcagcagcagccccagcagcagcagcagccccagcagcagcagcagcagcatggtgtgttctttgagaggttcagtggggccagaaagatgcctgtgggtctggagccctcagtgggctccaggcacccgttaatgcagcctccccagcaggccccgccaccccctcagcagcagcccccgcagcagccgccacagcagcagccgccgccgccacccgggcttctagtccgacaaaattcgtgcccgcctgcgctccctcggccccagcagggcgaggcgggcacgcccagcggcggcctgcaggacggaggccccatgctgcccagccagcacgcgcaattcgagtatcccatccaccggctggagaaccggagcatgcacccttattccgagcctgttttcagcatgcagcatcctcctccgcagcaggcgcccaaccagcggctgcagcatttcgacgcgcccccctacatgaacgtggccaagaggccgcgcttcgactttccgggcagcgcgggagtggaccgctgcgcttcgtggaacggcagcatgcacaacggcgctctggataatcacctctccccttccgcctacccaggcctacccggcgagttcacaccgcctgtgcccgacagcttcccttcggggccgcccctgcagcatccggccccggaccaccagtccctgcaacagcagcagcagcagcagcagcagcagcaacagcagcagcagcagcagcaacagcaacagcaacagcagcagcagcagcagcgccaaaacgcggccctcatgattaagcagatggcgtcgcggaatcagcagcagcggctgcgccagcccaacctggctcagctaggccaccccggggacgtgggccagggcggcctggtgcatggcggcccggtgggcggcttggcccagccgaactttgagcgcgaaggcggcagcacgggcgccgggcgtctgggcaccttcgagcagcaggcgccgcacttggcgcaagagagcgcgtggttctcaggtccgcatccgccgcccggagacctgctgccccgtaggatgggcggctcgggtctgcccgctgactgtggcccgcacgaccccagcctggcgccccctcctccgcctggtggctcgggggtgctgttccggggccctctgcaggagccgatgaggatgcccggagagggccacgtgcccgcgctgccttcaccgggcctgcagttcgggggcagtctgggaggcctgggtcagctgcagtcgcccggggcgggcgtggggctccccagcgctgcttcggagcgccggcccccgccgccggactttgctacgtctgcgctcgggggccagccgggctttccgtttggtgcagccggccggcagtccacgccgcacagcggtccaggcgtgaactcgccccccagcgcgggagggggcggtggcagctctggtggcggcggtggcgggggtgcctacccgccgcagcctgatttccagcccagccagcgcacctcggccagtaaattgggcgcgctctcgctgggctccttcaacaagcccagctccaaggacaacctgttcggccagagctgcctggctgcgctctccaccgcttgccagaacatgatcgccagcctcggggcccccaacctcaacgtgaccttcaacaagaagaacccgccagagggcaagaggaaactgagccagaacgagaccgacggcgcggcagtggccggcaacccgggctcggattacttcccaggagggactgctcctggggccccaggacccggaggcccgtccgggaccagtagcagcggctccaaagcctcggggccgcccaaccctccagcccagggggacggcaccagcctctcccccaactacaccctggaatccacgtcggggaatgacggcaagccggtctccgggggcggcggccggggacggggtcgcagaaaaagggacagtggtcacgtgagccctggcaccttctttgacaagtactcggcggctccggacagcgggggcgcacctggggtgagcccagggcagcagcaagcgtcaggcgcagccgtcgggggaagctccgcaggcgagacgcgcggggcaccgacgccccacgaaaaggcgctcacgtcgccatcctgggggaagggggctgagttgctcctgggggatcagccggacctcattgggtccctggacggcggggccaagtcggacagtagttcgccaaacgtgggtgagttcgcctcggacgaggtgagcacgagctacgccaatgaggacgaggtgtcgtccagctctgacaacccccaggcactagttaaagcgagcaggagtcccctggtgaccggctcgcccaaactccctccccgtggggtaggcgccggggaacacggaccgaaggcgcccccgcccgccctcggcctgggcatcatgtctaactctacctcgacccctgacagctacggcggcggtgggggcccgggccatccgggcactccgggcctggagcaggtccgcaccccgacgagcagcagcggcgccccgccacccgacgagatccaccccctggagatccttcaggcgcagatccagctacagaggcagcagttcagcatctccgaggaccagcctctggggctgaagggtggcaagaagggtgagtgcgccgtcggggcctcaggggcgcagaatggcgacagcgagctgggcagctgctgctccgaggcggtcaagagcgccatgagcaccattgacctggactcgctgatggcagagcacagcgctgcctggtacatgcccgctgacaaggccctggtggacagcgcggacgacgacaagacgttggcgccctgggagaaggccaaaccccagaaccccaacagcaaagaagcccacgacctccctgcaaacaaggcctcagcatcccagcctggcagccacttgcagtgcctgtctgtccactgcacagacgacgtgggtgacgccaaggctcgagcctccgtgcccacctggcggtccctgcattctgacatctccaacagatttgggacattcgtggctgccctaacttgaatgacaagaaagatcccctcctctaccaggcccttcctctccccctgtctgtttccttccccctcaaccttaccccacccctctgttaatttgaaagggccactattgctgagtggatgagttttttttttttctctaggttggtacctgcttagtggcatatggaccggaaagggttaatttaaagggggggaacctcaaaagtttttttaaaaaagaaacttgtctgccacagtatgttaccagtgttaacccttctgcagttagcaaacttttgcttaagcctttttcctctagatactccccatgtttcggtaatcttggcatacattttttagatgacctctttccttgttttgttttcatgctgctgtatgtccaagtattgttatttcataataagacaagagttgctttcttttttattctttttccttttcttaccccctccccttttattttctttttgctttgttcactgcttattaaaatggaaatcctggagaatagtagttctggaatattgccgggtgaaagtccaattgtcatcacaatgttatatattgacaccccagtgtcatcagtcaggcaggagccaaacaatgaatgcccctcttaggtattccgcctgggattttgttttgtctgttccctaagaaaatatattttcattcctgcaaacacagtgctcagccttcagttcccttccacttgagttctctcttctcctgctggaagccgcccctctctgcgatggacgtgaggacgtgtccagctctgctctgtgggaaggagttggaatgttcgacagcagtgttttctctccttttctgggcctcctcgcaaatgcccaggccctgcattttcacgctgtgctaagcagcctttggtctgcatgggggatggtgtgctcccagcctgcagtctttggagcaaggctgctgcccgtgccttgggtgctggagttggaggaggctgttctcagccctttcccttttctgaaagctgttcctggccgggcatcccagggaagaaggaggggactgcgtgtatctcctccacctctcccattccatccccagtccagcctgggcaaccccacccctgggagggatgaggcaccctcttgctcagcctgctcagccttctctgagcctttgcagggatctgcagactcctgagggctagaggacagagaaagagaatagaatgaaatgactttgattcctgcgccttttagttttgaactctggaattcctctgccccctccccaacatttttttggaatctcaccctgttgcaaaactagagccatgtcccaagcatctcacaaaggaataactgctctgagcagagatgagtggtggttggcaggggcaggcaactttgggtgctgctgatgcctgcaaaagccatttatggcttgtggtggggggcacatagattccccggtgggttagacaggaagtaactgatatcacttcacccaaatatataaccgtgatggttatctatttaatttcagtttttgttaacgagcgtgtcttactaaaacgctccactttgagctcccccaccccctccaggtcctcagagtttgcagatctgggctttctaaagcaagtgacctgaaggctctgggctcaccatacaacacccacgttgtttatttcaaagaacttttcagcgaagggagaggagctttcagaaaaacctcactctttcccctcccttctcccctctttccttctgccggtccttttggctggggtctgagtctgcggttctcgcctgggcagtcttgacgaggagcaaaccccgccttcagagggcagacaaagcaggtggcatgaattgatcagcgagaaaggtgtgagccgaggcagttcctgcgttctgctacaaaaggaatggaaagggaagggaatttccccccaccatgggctgtgggagagttgaccgtattctgggcaagactccatgacccctctgattctgcagtgtacagctgtttgagagcctcatcattttacttttgaaacaggaatgatttctccttaattgcttaaggccggggagcaaagtgtcttaacttctgtctttgactttcccagcgttgagtcatcaacactttgccaattagctcatggtcctggcaacctcagaaacccctgaagttttaaaaactttctcgctccccacgaccccagaatgaaacagctttaaaaatagccttaagcaaaaggatgttatttcattaaatttggtttaatggaaagaataaaagtaaatgaaaaacacaccctacacactagactccgaacactggtaatcagtactgcatagcaaactctttgggaaagaaaacgaaaatgttattgcacatgtaaaatatgaaaacttaactctgctgtgtgttaggcaatcctgtaatcttttttgactcttaaaagaaattcatttctgaaatgcttggttggaagactgtgacaatagctcatgaaattgagtgttatttttttctttcttttttaaaaaaatatgtaaagtgcagtcttctgtattcctgcatattgtatatacctgtatatgttttcctgagcagttaaataacaataaatatgacgttaatggtga

SEQ ID NO: 89 - protein, 244 aa, Homo sapiens
MENFTALFGAQADPPPPPTALGFGPGKPPPPPPPPAGGGPGTAPPPTAATAPPGADKSGAGCGPFYLMRELPGSTELTGSTNLITHYNLEQAYNKFCGKKVKEKLSNFLPDLPGMIDLPGSHDNSSLRSLIEKPPILSSSFNPITGTMLAGFRLHTGPLPEQCRLMHIQPPKKKNKHKHKQSRTQDPVPPETPSDSDHKKKKKKKEEDPERKRKKKEKKKKKNRHSPDHPGMGSSQASSSSSLR

SEQ ID NO: 90 - DNA, 1099 bp, Homo sapiens
  source 1..1099: mol_type = other DNA
ggcagacacggagacagcgccggggcggagggtacgatggagaatttcacggcactgtttggggctcaggctgacccaccaccgcccccaaccgcactcggcttcggaccaggaaagcctccacccccgccaccgcctcctgcgggcgggggacccggcacggccccgcctcccaccgcggccacggctcctcctggcgcggacaagtcaggagctggctgtggccctttttacctcatgagggaactgccaggtagcacagagctgacaggcagcacgaatctgatcacacactacaacttggaacaagcctataataaattctgtgggaagaaggtgaaggagaagctaagtaacttcctgcctgacctgccagggatgattgatctgcctggttcccatgataacagcagcctccgctctctcattgagaagccccctattctcagtagctctttcaatcctatcacagggaccatgctggccggcttccgcctccacactggcccgttgccggagcagtgtcgtctgatgcatattcagcctcccaagaagaagaataagcacaagcacaaacagagccgtacccaggatcctgtccccccagaaacaccatctgattcagatcacaagaagaagaaaaagaaaaaagaagaggatcctgaacggaaaaggaagaagaaagagaagaagaaaaagaagaatcgacatagtccagaccacccaggtatgggcagctcccaggccagcagcagcagcagcctacgctaataggaccactggactctttgccaggatggcttttcctgctgtactgaacctgctgataaaagctgccttccaggctcttggacactgccttgggagcatcctgcagctgggacagaggccagctcctgttgggctcagttgagactaagtaaattaggagagagagggacatgcttttgtaggctcatcccagttggttttctcatggacatctcttcctctcccaggaagcttacaattttcttctctctcttttgtgcaatttgtctgatttaggacttgttctgtgttttctttaaaaaaaaaaaaattacatttatcaaactgg

SEQ ID NO: 91 - protein, 254 aa, Homo sapiens
MDPAASSCMRSLQPPAPVWGCLRNPHSEGNGASGLPHYPPTPFSFHQKPDFLATATAAYPDFSASCLAATPHSLPQEEHIFTEQHPAFPQSPNWHFPVSDARRRPNSGPAGGSKEMGTSSLGLVDTTGGPGDDYGVLGSTANETEKKSSRRRKESSDNQENRGKPEGSSKARKERTAFTKEQLRELEAEFAHHNYLTRLRRYEIAVNLDLSERQVKVWFQNRRMKWKRVKGGQPISPNGQDPEDGDSTASPSSE

SEQ ID NO: 92 - DNA, 2674 bp, Homo sapiens
  source 1..2674: mol_type = other DNA
agccctctgcaggcatttgctctgggctccaggacgaactcctcgtcagctggtgcgtctgggttgggacagtgaaaatgtttagtgtcattggcgacaaatacacatacaggggatcccagtaggtaggctggtgcattggaggggcaggagcaagcccgacataggtgtgtgcacacacataggagtagctggccacatgtgtgtgtactttaaggagagactttagttttgggtttttttttttttttggttcctggggtaaattttctgttgaacatttttccctcctatttagttttttttcttttgcatttttaaaaatttgaacataaaaagtataaagaatcaaatctttgaaaggaccgaggcgtgcagcggacagcagatggatcccgcggccagcagctgcatgaggagcctccagcccccagcccctgtctggggctgccttcgaaacccccactcggaaggcaatggggcctcagggctaccccactacccgcccaccccgttctccttccaccagaaaccagacttcctggcgacagcgacggcagcgtaccctgacttctcagcctcctgcctggcagccaccccacacagcctgccccaggaggagcacatcttcactgagcagcaccccgctttcccacagtcccccaactggcacttccctgtctcagacgcccggcgcaggcccaactcaggcccggcagggggttccaaggaaatggggaccagcagcctgggcctggtggacaccacaggaggcccaggcgatgactacggggtgcttgggagcactgccaatgagacagagaagaaatcatccaggcggagaaaggagagttcagacaaccaggagaacagagggaagccggagggcagcagcaaagcccgcaaggagaggacggccttcaccaaggagcagctgcgagagctggaggcagagtttgcccatcataactacctgactcggctccgcagatatgagattgcggtaaacctggacctctctgagcgccaggtcaaagtgtggttccagaaccgaaggatgaagtggaagcgtgtgaagggaggtcagcccatctcccccaatgggcaggaccctgaggatggggactccacagcctctccaagttcagagtgagattctgcatggaggaaaaatgactaaggactgagccccctacccaactacccccaccccaatcccaccttcaccctcttccttccccagccagggcagcctctccacatctttccctgactcttggatatgaaactgcccagcattcctgggagtcttaggattttctaggaagttctgtccagcctcttagcagcctcttccctagggcctttgctcccacactctcatggaatcagacagagatcctaccgggccggatgaatctggaaacagcttcagagatactgcttctcagcgtctcttggctgccacccatgcctcctcctaccgctgttctcctaggtcagccaggcctcctcctggtctggacaccacctggcctggtgggagaggagctttggaaccagctggcgactcggaaagtaaatgcttcaaaaggaaggaaatgacagagacacacgcccttgcccaccttcctctgtaggctgcacatctgaggctttggggccccttagttgtcccgaaaccccaagaaaaatcagaatgaggagagtcaaggacagcaactcagctgctgcaagccagaaacacatccctgtctccaaatttgttggctaagtggagacacttctgagaactgactagagaagacagaaaaatagcccgatgtaggtttcggtgtccccatataggcccgtccacacaggcttgactgggtggacaagaatgaacccatgacagcacctgctgcttcaaaatcaaaatcaatttagggatacagcaggggctgttgggctgtgctccagagaaaaggagcagctactccttttaaatccacgatttctggattgaaaacctgtccagatgctgagttgttgggctgaacaactaggagctgaaaacaacgtagaggctggaaagtgtcccctgcattctggaggggaggggagataataaggagggctgctgggtgagggcctggagatgtggaaccctggagtggaaggttctccagtgacagtgtcctgtgactgcaaaaggggacaagaaaatccctcttcctccatgggatggatttaagctcttgctgtgtgttctacaaatgctgttattgtgggaggaaatgctaggtttttgtgtgtggactgcccagacctcagccaggtcttctggagatgacatttgaggactgatggccaaagagcatgggggactgaagccctggctgcctcagcgctctgtctcccaacaccagctggtgttgcagagggaggtcaacgtgagtttggatctcttgtacgcagatgtaatcattcacatgtaaaaataaccccacctccccaccccaaaaagggcaagagctgtggaaaatgattgccaaatgagatggctggttagagcatgattttttctaaagcatacttcatatattttcttaagattacatcaagctaattgtgcgagctcaattcactttgtaagaaaactctcggagaaataaaatcaataaaaagcaaa

SEQ ID NO: 93 - protein, 460 aa, Homo sapiens
MASREEVLALQAEVAQREEELNSLKQKLASALLAEQEPQPERLVPVSPLPPKAALSRDEILRYSRQLVLPELGVHGQLRLGTACVLIVGCGGLGCPLAQYLAAAGVGRLGLVDYDVVEMSNLARQVLHGEALAGQAKAFSAAASLRRLNSAVECVPYTQALTPATALDLVRRYDVVADCSDNVPTRYLVNDACVLAGRPLVSASALRFEGQITVYHYDGGPCYRCIFPQPPPAETVTNCADGGVLGVVTGVLGCLQALEVLKIAAGLGPSYSGSLLLFDALRGHFRSIRLRSRRLDCAACGERPTVTDLLDYEAFCGSSATDKCRSLQLLSPEERVSVTDYKRLLDSGAFHLLLDVRPQVEVDICRLPHALHIPLKHLERRDAESLKLLKEAIWEEKQGTQEGAAVPIYVICKLGNDSQKAVKILQSLSAAQELDPLTVRDVVGGLMAWAAKIDGTFPQY

SEQ ID NO: 94 - DNA, 5112 bp, Homo sapiens
  source 1..5112: mol_type = other DNA
acgacaacttccggaagaggtcgccatggcttcccgggaggaggtactcgccttacaagctgaagttgcccaacgtgaggaggaattgaattcgctgaagcagaagctggcgtcggctcttttggctgagcaggaaccgcagccagaacggctggttccggtgtcgccgctgccgccgaaggccgctctgtcccgagatgagattctgcgctatagccggcagctagtgctgcccgagctgggcgtgcacggacagctgcgcctggggaccgcgtgcgtgctaatcgtgggctgcggtgggctcggctgtccactagcgcagtacttggcagcggccggcgtgggccgccttggccttgtggactatgacgtggtagagatgagcaacctggcccgccaagtgctgcatggcgaggcactggctggccaggccaaggccttttcggccgccgcctcgctgcgccgcctcaattcggcagtggaatgcgtgccgtacactcaggcccttacgccagccactgccctagacctggtccgccgatatgatgtggtggctgactgctcggacaacgtgcccactcgctacctggttaatgacgcatgtgtgctggcgggtcggcccctcgtgtctgccagtgccttgcgcttcgagggccaaatcacagtctaccattatgacggtggcccttgctatcgctgcatattcccccaaccacccccagcggagacagtgaccaactgcgcggacggcggggtgctcggtgtcgttaccggggtcctgggctgcctgcaggccttggaagtgctgaaaatcgctgcgggtctgggcccctcttacagtggcagcttgttgctctttgatgccctgagagggcatttccgctctattcggctgcggagccgcaggctcgactgtgcagcttgcggggaacggcccactgtgactgatctgctggactatgaagccttctgtggctcctcagccactgataaatgccgctccctgcaactactgagcccagaggagcgtgtttctgtcaccgactataagcgactgctggattctggggcattccacctgttgctggacgtcaggcctcaggtggaggtggacatttgtcgtttgcctcatgccctacacatccctctgaaacatttggaacgcagggatgcggagagcctgaaactcttaaaagaagcaatctgggaagagaagcagggcacacaagaaggggctgctgtccccatttatgtgatttgcaaactgggaaatgactcacagaaagccgtgaagatcctccagtccttatcagcagctcaagagttagaccctttaacagttcgggatgttgtggggggcctcatggcctgggctgccaaaatcgatggaacatttccacagtactgaggtgactggtatagtctgatgagaaagatgtggattgccataatacctcaaagatacacttgtttgcatttttcggtaatatacataggagctggggattctacagtatctgtgaatacgtggactcctttttataaggagttttaaaaattgttatgtattggatgaatgacttattaatggattataccgtttctgagaaccatcattttttttttcagcacacggaggatgtcttggacatgtgagatgtaacgtgacaggattttgcattttaaactgcagatcatttacatgtccttattttccacctcccccagtcaaaatgctttctaaatcattttcacagattatatacttcggatctgtttactgttcagttaagaaattcttggatcttattaatatttcagatgatagaatacatcctacagaaatacatgtttaaaatgtaaattgttttaattattcagaaagagggtcattctatttggccttttgaattagtatcaaaatgagattttttttttttttttgagatggaatctctctctgttgcccaggctggagtgtagtggtgcgatctcagctcactgcaacctccgcctcccaggttcaagcgattctcctgcctcagcctcctgagtagctgggattacaggcgcacgccaccacgcctggctaatttttgtatttttagtacagagggggtttcaccatgtttgtcaggctggtctcgaactcctgacctcgtgatccgcctgcctcgacttcccagagtgctgggattacaggcgtgagccaccacaccctcccgagatctttaaagtttaccaaaataaaggaaaccacctttgtagtctgtcagtgtctcttataaattgctactgttttcttaaagttaacttcagggtccaccttatgttgcacacatatcacatcgtttaaattgcatactatggtttgacttgctttggaattttcaagtcaaagtcccaaccctttgcctctccccctttaatttgccttttctcttttgatttaatgtttttttattccagcattttatactaatgtaaaatgtttttatgtttgtttacttaacattttcataaaatagtaggtagtctcaccaacttccaatatatacaacaacattataagtaaaaatttgatttgtgagtgcctatcagtggccagatgaactaatggcttgtcagaagggggcctgtgacctcctgcttgctgcatgcaggcttataatcatcaattgctgctgttgtttttttaagaatggcagaaatcacagatacaactataaaatctttgtatttctgttaaccattttttttaaagcttaaatgtatcataagccagcaaaaaccctttgtagaccagatttacttaccagtttgcaatttgtgatatagaatcttgttttattataagagggtggtatttaacaaattcaaaattagtcatcactttttaactgtgaaacattgtaactaattctttgaacaggtatacttaaagtatggtatacccttctgttataaagatgaagcaggtctcttatgactgttcctgccaacgagttatggaggtaaatgactgtgacctggagtggagaacaaagatggctggcctgtgtttttcatctccttcttccagggacaactgattctgatacatagcaggaaacaaatagcgacacacaggaacaatttcatattctaaagactgaagtcctaaagttatagacagttgtagttcctataaacctggttgtcacaggggacaggcaagagaagctgactagctaagtgttaaaaggtttactaaagtgataggaggtgcttttgagaattttggggacagattcaaggctgtacttctaggaatgatgcccgaaatcatgcacaaaactggccttaggagaacagtgtctatgttgtgctgccctatcaagtaccggaggaaacgccactacagtctcaccagtttcacttgacgtgcccccccaactctcccagaaagcccaacacttcagccacagtccatgtgtcgagaaacagagtcactacattattcttttctgagtcaagccttatgagggtgcctggtaggcagagtctaattacatgcctacatcttagctgcaagagaggctgggaatttgtgttttgatatctacaataggaagacagaactcatgatgtgggattttcccaaatagtgaaatatttttcaaaagatgggctgttaagaatataacagatacccagtacacaacccagatctatttcagtatttgttttttgttgttgttgttttggagacagagtctcgctctatcccccaggctggatggagtgcagcggcacaatctcggctcactgcaacctccacctcccatgttcaagtgattctcatgcctcagcctcctgagtagctgggattacaggcacctgccaccacatctggctaatttttctatttttagtagcgatggggtttcgccatgttggcctggctggtcttgaactcctgacctcaggtgatctgtgcacctcagcctcccaaagtgctaggattacaggcatgagtcactgcacctggcatatattagtatttgaaatttggttttctctggggattgtagctaggtttttatggtgagataggatttgaacataatttgttttttgagacgaagtcttgcttcgtcgcccagggtggagtgtagtgttgtgatcacagctcgctgtggcctcaacctcctgggttcaagtgatcctcccacctcagcctctcaagtagcttgaattacagttgtatgccaccatgcctagccattttttaatttaaaaattttttggtagcaatggggtctgaatatgtggcctaggctgatctcaaactcctgggctcaagcatccctcctgcctcagcctcccaaagtgcttgggattacgggtatgaggcaccatgcccagcctgaacttgatttttttgttgtttccttttcataacaaacatcaaatgccttcagtgtactagttcttctaggttctggaataaaaatgagcaagaggtttcctgttgtagaggagtttatatttaaatggtgataagtaaattactgataagtgccataaaagaaatgaaactgtgacatattagggtgggggaggggatctgttttgaatagcttaattatggaaggcctcagagatgacattaaacccaaaacctgaaaggtgagaaagagccagttacagaagatctgaggaaaattctatactgggagaaaaataactgtaaagacctcaaggtaaataaacttggaatgttccgttcaagaaactgcagaggcaagttgggttgcaaacaattagggagagtgggacagggtgaggtttgagaagcagggaacatcataaactttgtagaccatagtagtttggtttttattctaaatacaataatagctaatattttgagcacttactgtgttatttgggatttgaatccagatgctctggttgaagagcccattccctaagtgtcatgctatactgactctaagcaaaactttgccattgcttcatatgtgttcatgccctgtcagggcatagaaagcaatctatgtcctgacaatcacggaagtgtattccagatacaatagaaatgtactctga

SEQ ID NO: 95 - protein, 231 aa, Homo sapiens
MAGKKVLIVYAHQEPKSFNGSLKNVAVDELSRQGCTVTVSDLYAMNLEPRATDKDITGTLSNPEVFNYGVETHEAYKQRSLASDITDEQKKVREADLVIFQFPLYWFSVPAILKGWMDRVLCQGFAFDIPGFYDSGLLQGKLALLSVTTGGTAEMYTKTGVNGDSRYFLWPLQHGTLHFCGFKVLAPQISFAPEIASEEERKGMVAAWSQRLQTIWKEEPIPCTAHWHFGQ

SEQ ID NO: 96 - DNA, 1588 bp, Homo sapiens
  source 1..1588: mol_type = other DNA
gcaggttccgggctgcttaggttggcaccggtccgtggtccccgggggcgcagtcgcagcgctcccgccctccaggcgtcagcgagtgcgcggtccagtgcggccggaacctggcgcaactcctagagcggtccttggggagacgcgggtcccagtcctgcggctcctactggggagtgcgctggtcggaagggggatggagacagaagtcacaaactcacatgccaccagccatatgatgtaaacatgtaaactgggccaaggaatacaaaagggagtggtgagctggggacactgaagaatggatgccctgtctagaggagtgaaaatgaagcatttcatacaaacaacatgatttcgggcaatcactttgggaatcaggataaggtgttcccccagtctgcagaaacactggcaacatttacaaagctttaggttcattcttgtaagtgttgctggtgtcagaataggaacctccctgcgctttgaagggatgaatgtgacctctcccacattctccggtgctgtgatgtaccttaaacacagcaagggcacctggcctgggtggagcccactcctcagcacccacctcacttcttgcagtattctgcagaccccagccctgtgcctgtgctcctggacagctggagataaggagtgggccctggaagatgctcattcaggccctgctcaagattccagtcctgattgctggactcgctgaagagagactacgcaggaaagccccagccacccatcaaatcagagagaaggaatccaccttcttacgctatggcaggtaagaaagtactcattgtctatgcacaccaggaacccaagtctttcaacggatccttgaagaatgtggctgtagatgaactgagcaggcagggctgcaccgtcacagtgtctgatttgtatgccatgaaccttgagccgagggccacagacaaagatatcactggtactctttctaatcctgaggttttcaattatggagtggaaacccacgaagcctacaagcaaaggtctctggctagcgacatcactgatgagcagaaaaaggttcgggaggctgacctagtgatatttcagttcccgctgtactggttcagcgtgccagccatcctgaagggctggatggatagggtgctgtgccagggctttgcctttgacatcccaggattctacgattccggtttgctccagggtaaactagcgctcctttccgtaaccacgggaggcacggccgagatgtacacgaagacaggagtcaatggagattctcgatacttcctgtggccactccagcatggcacattacacttctgtggatttaaagtccttgcccctcagatcagctttgctcctgaaattgcatccgaagaagaaagaaaggggatggtggctgcgtggtcccagaggctgcagaccatctggaaggaagagcccatcccctgcacagcccactggcacttcgggcaataactctgtggcacgtgggcatcacgtaagcagcacactaggaggcccaggcgcaggcaaagagaagatggtgctgtcatgaaataaaattacaacatagcta

SEQ ID NO: 97 - protein, 571 aa, Homo sapiens
MALPRPSEAVPQDKVCYPPESSPQNLAAYYTPFPSYGHYRNSLATVEEDFQPFRQLEAAASAAPAMPPFPFRMAPPLLSPGLGLQREPLYDLPWYSKLPPWYPIPHVPREVPPFLSSSHEYAGASSEDLGHQIIGGDNESGPCCGPDTLIPPPPADASLLPEGLRTSQLLPCSPSKQSEDGPKPSNQEGKSPARFQFTEEDLHFVLYGVTPSLEHPASLHHAISGLLVPPDSSGSDSLPQTLDKDSLQLPEGLCLMQTVFGEVPHFGVFCSSFIAKGVRFGPFQGKVVNASEVKTYGDNSVMWEIFEDGHLSHFIDGKGGTGNWMSYVNCARFPKEQNLVAVQCQGHIFYESCKEIHQNQELLVWYGDCYEKFLDIPVSLQVTEPGKQPSGPSEESAEGYRCERCGKVFTYKYYRDKHLKYTPCVDKGDRKFPCSLCKRSFEKRDRLRIHILHVHEKHRPHKCSTCGKCFSQSSSLNKHMRVHSGDRPYQCVYCTKRFTASSILRTHIRQHSGEKPFKCKYCGKSFASHAAHDSHVRRSHKEDDGCSCSICGKIFSDQETFYSHMKFHEDY

SEQ ID NO: 98 - DNA, 2269 bp, Homo sapiens
  source 1..2269: mol_type = other DNA
gcccgaagtctaccgagcccgagtggcctaccgagcccgagtggccccgcagcgtccaggaggcgcccgctccgcggtggcgctcttggaggtggtgtcggagagccgccgagcgtgcggtcccgggatggctctaccccggccaagtgaggccgtgcctcaggacaaggtgtgctacccgccggagagcagcccgcagaacctggccgcgtactacacgcctttcccgtcctatggacactacagaaacagcctggccaccgtggaggaagacttccaacctttccggcagctggaggccgcagcgtctgctgcccccgccatgccccccttccccttccggatggcgcctcccttgctgagcccgggtctgggcctacagagggagcctctctacgatctgccctggtacagcaagctgccaccgtggtacccaattccccacgtccccagggaagtgccgcccttcctgagcagcagccacgagtacgcgggtgccagcagtgaagatctgggccaccaaatcattggtggcgacaacgagagtggcccgtgttgtggacctgacactttaattccaccgccccctgcggatgcttctctgttacctgaggggctgaggacctcccagttattaccttgctcacccagcaagcagtcagaggatggtcccaaaccctccaaccaagaagggaagtcccctgctcggttccagttcacggaggaggacctgcacttcgttctgtacggggtcactcccagcctggagcacccagccagcctgcaccatgcgatttcaggcctcctggtccccccagacagctctggatctgattctcttcctcaaactctggataaagactcccttcaacttccagaaggtctatgcctcatgcagacggtgtttggtgaagtcccacattttggtgtgttctgcagtagttttatcgccaaaggagtcaggtttgggccctttcaaggtaaagtggtcaatgccagtgaagtgaagacctacggagacaattctgtgatgtgggagatctttgaagatggtcatttgagccactttatagatggaaaaggaggtacggggaactggatgtcctatgtcaactgtgcccgcttccccaaggagcagaacctagttgctgtgcagtgtcaagggcatatattttatgagagctgcaaagagatccatcagaaccaagagctccttgtgtggtatggagactgctatgagaaatttctggatattcctgtgagccttcaggtcacagagccggggaagcagccatctgggccctctgaagagtctgcagaaggctacagatgtgaaagatgtgggaaggtatttacctacaaatattacagagataagcacctcaagtacaccccctgtgtggacaagggcgataggaaatttccctgttctctctgcaaacgatcctttgagaagcgggaccggcttcggatccacattcttcatgttcatgagaagcaccggcctcacaagtgttctacatgtgggaaatgtttctctcaatcttccagcctaaacaaacacatgcgagtccactctggagacagaccataccagtgtgtgtattgtactaagaggttcacagcctccagcatactccgcacacacatcaggcagcactccggggagaagcccttcaaatgcaagtactgtggtaaatcttttgcatcccatgctgcccatgacagccatgtccggcgttcacacaaggaggatgatggctgctcatgcagcatctgtgggaaaatcttctcagatcaagaaacattctactcccacatgaagtttcatgaagactactagccctgccaggcacaatgactcacgcctgtaatcccagcactttgggaggcagaggtgggtggatcactcaagtccaggagttcgagaccagcctgggcaacatggtgaaatcctgtctctaccaaaaaaatacaaaaatcagctgggggtggtggcacatgcctgtggttccagccactcaggaggtcgaggtggcaggatggtttgagcacaggagacggaggttgctgtgagctgagatcgccccactgcttttcaacctgggtgacagaaccagaccctgtctcaaaacaaaacaaaacaaaaaaaatgagtagccctcaagagtgtggagacaatgtaaaaacaagagattcggattctctctatttccttttatgggttatagaagtccctgcagttggctgtgtgtggtggctcacgcct

SEQ ID NO: 99 - protein, 242 aa, Homo sapiens
MAGKLKPLNVEAPEATEEAEGQAKSLKTEDLLAMVIKLQKEGSLEPQIEDLISRINDLQQAKKKSSEELRETHSLWEALHRELDSLNGEKVHLEEVLGKKQEALRILQMHCQEKESEAQRLDVRGQLEDLMGQHKDLWEFHMLEQRLAREIRALERSKEQLLSERRLVRAKLREVERRLHSPPEVEGAMAVNDGLKAELEIFGEQVRSAPEVGAGEGEAGPELPRARDEEDPEPPVAAPDAL

SEQ ID NO: 100 - DNA, 1057 bp, Homo sapiens
  source 1..1057: mol_type = other DNA
accagtcatcaagcgaggctcgcgcgcaggccccgcgttggaaaatggcggggaagctgaaacctctgaatgtggaggcgccagaagctactgaggaggctgaagggcaagccaagtctttgaagactgaagacttgctggcaatggtgataaagctgcagaaagagggaagcctggagccacagatagaggacctgattagccggattaatgatcttcagcaagcaaagaagaaatccagtgaggaactgagagagacccacagtctctgggaggccctgcatagggaattagactccttgaatggagagaaagtgcacctagaggaggtcttgggcaaaaagcaagaggcactgaggatcctccagatgcactgccaagagaaggaaagcgaggctcagaggttggatgtcagaggacagctggaggatctgatgggccagcacaaggacctctgggaattccacatgctggagcagcgactggcccgggagatccgtgccctggagagaagcaaggagcagctgctctcggagaggaggctggtgcgcgccaagctgcgggaggtggagcggcggctgcactcgccgcctgaggtcgagggcgccatggcggtgaatgacgggctgaaggcggagctggagatattcggggagcaggtccggagcgcccccgaggtcggggccggcgagggagaggccggacctgagctcccccgcgctcgcgacgaggaggatcccgagccgccggtggctgcccctgacgccctctaggccagcaggacccgcccgttcccgaccttccctcgagacccgccaagaaataaaggcgatgatttccgaccatgctcgcgttctccgcggagtctgtgctacaccgtggagcggggcggggcgtgctgggatctcgaggcggggcctctgccggacccctcccaccagtcgagccccgggcgccgtacagaggctgggtaaatgctcctgaactcagagagagtaagtgggtgtcagtatcccccgccccacggcctcatctcgagttcccaaaccatctatgt

SEQ ID NO: 101 - protein, 934 aa, Homo sapiens
MIDLSFLTEEEQEAIMKVLQRDAALKRAEEERVRHLPEKIKDDQQLKNMSGQWFYEAKAKRHRDKIHGADIIRASMRKKRPQIAAEQSKDRENGAKESWVNNVNKDAFLPPELAGVVEEPEEDAAPASPSSSVVNPASSVIDMSQENTRKPNVSPEKRKNPFNSSKLPEGHSSQQTKNEQSKNGRTGLFQTSKEDELSESKEKSTVADTSIQKLEKSKQTLPGLSNGSQIKAPIPKARKMIYKSTDLNKDDNQSFPRQRTDSLKARGAPRGILKRNSSSSSTDSETLRYNHNFEPKSKIVSPGLTIHERISEKEHSLEDNSSPNSLEPLKHVRFSAVKDELPQSPGLIHGREVGEFSVLESDRLKNGMEDAGDTEEFQSDPKPSQYRKPSLFHQSTSSPYVSKSETHQPMTSGSFPINGLHSHSEVLTARPQSMENSPTINEPKDKSSELTRLESVLPRSPADELSHCVEPEPSQVPGGSSRDRQQGSEEEPSPVLKTLERSAARKMPSKSLEDISSDSSNQAKVDNQPEELVRSAEDVSTVPTQPDNPFSHPDKLKRMSKSVPAFLQDESDDRETDTASESSYQLSRHKKSPSSLTNLSSSSGMTSLSSVSGSVMSVYSGDFGNLEVKGNIQFAIEYVESLKELHVFVAQCKDLAAADVKKQRSDPYVKAYLLPDKGKMGKKKTLVVKKTLNPVYNEILRYKIEKQILKTQKLNLSIWHRDTFKRNSFLGEVELDLETWDWDNKQNKQLRWYPLKRKTAPVALEAENRGEMKLALQYVPEPVPGKKLPTTGEVHIWVKECLDLPLLRGSHLNSFVKCTILPDTSRKSRQKTRAVGKTTNPIFNHTMVYDGFRPEDLMEACVELTVWDHYKLTNQFLGGLRIGFGTGKSYGTEVDWMDSTSEEVALWEKMVNSPNTWIEATLPLRMLLIAKISK

SEQ ID NO: 102 - DNA, 4348 bp, Homo sapiens
  source 1..4348: mol_type = other DNA
agtgccgggcgacacccgggccgtgccgccagcgtccgtcgggagagtgaaggctcgcaacgccttgcccgggggaaggtaacgcgccgcgcccggggctgcgcggtttgcaccgccaggccgagggctgggggccagaagacaagagagacggcgaggcgcgctccctgcccggcagcgactcggaggtaggtgatgctctgatgctgctgcctcttatgaattgacgacaggtgcagagagagaataaactgtgtctaagactggaccagagagtgagtgtgctggaagccaccataggaacaagcgacctgtttggcaaggaatacagcatccttctgagagcctcttctcgacactatcccacagaccaggacttcctcatgggaaagagcacttaggatcttgctatcagctgccctaaacttttgctgagccaaaataagactttgatgcagaactgaacaagatatttcatttttgtgtgttttaatcttcctggttgcagtcttagttgttcagccctgagaattttgagccacatttgttgctattatttttgcatgcacttttcaaaatgattgacttaagcttcctgactgaagaggaacaagaggccatcatgaaggttttgcagcgggatgctgctctgaagagggccgaagaagagagagtcagacatttgcctgaaaaaattaaggatgaccagcagctgaagaatatgagtggccaatggttttatgaagccaaggcaaaaaggcacagggacaaaatccatggcgcagatatcatcagagcatctatgagaaagaagaggccccagatagcagctgagcagagtaaagacagagaaaatggggcaaaggaaagctgggtgaataatgtcaacaaagatgctttccttcctccagagctggctggcgttgtagaagagccagaagaagatgcagcaccagcaagcccgagttccagtgtggtaaatccagcttccagtgtgattgatatgtcccaggaaaacacaaggaaaccaaatgtgtctccagagaagaggaagaatccgtttaatagctccaagttgccagaaggtcactcatcacaacaaactaaaaatgaacagtcaaaaaatggaagaactggtttatttcagacttcaaaagaggatgaattgtcagagtcaaaagaaaagtcaactgtcgcagatacttcaatccaaaagttagagaaatcaaagcagactttgccaggcctttcaaatgggtcccaaatcaaggctccaatccccaaagccaggaagatgatctacaaatcaactgatttaaacaaagatgataaccagtcttttcctagacaaaggacagactccctgaaagcgagaggggctccgagagggatcctcaagcgcaactccagttccagtagcacagactcagaaacccttcgttataatcacaactttgaacccaaaagcaaaattgtgtcacctggcctaaccatccatgagagaatttctgagaaggagcattctttagaagacaactcttccccaaactccctggagccattaaagcatgtgagattctctgcagtgaaggatgagcttccacagagtcctgggctaatccatggtcgggaagtaggagaatttagtgttttagaatctgacagattgaaaaatggaatggaagatgcaggggacacagaagagtttcagagtgaccctaagccttctcaatacagaaagccttcgctttttcatcaatcaacctcaagcccatatgtatcaaaaagtgaaacacatcagccaatgacttctggttcttttccaattaatgggctgcattctcattcagaagttttaactgcaagaccacagtctatggagaattcaccaaccatcaatgaacccaaagataaatcatcagaattaacaaggcttgaatctgtattacccagaagccctgctgatgaactgtctcattgtgttgagcctgagccatctcaggtgccaggtggcagttctagagaccgtcagcaaggttcagaagaagaacccagtcctgttttgaaaactttggaaaggagtgccgctaggaaaatgccttccaaaagtctagaagacatttcatcagattcatcaaatcaagcaaaagtagataatcagccagaagaattagtgcgtagtgctgaagatgtttccacagtgcctacacaacctgataatccattttctcaccctgacaaactcaaaaggatgagcaagtctgttccagcatttctccaagatgagagtgatgacagagaaacagatacagcatcagaaagcagttaccagctcagcagacacaagaagagcccgagctctttaaccaatcttagcagctcctctggcatgacgtccttgtcttctgtgagtggcagtgtgatgagtgtttatagtggagactttggcaatctggaagttaaaggaaatattcagtttgcaattgaatatgtggagtcactgaaggagttgcatgtttttgtggcccagtgtaaggacttagcagcagcggatgtaaaaaaacagcgttcagacccatatgtaaaggcctatttgctaccagacaaaggcaaaatgggcaagaagaaaacactcgtagtgaagaaaaccttgaatcctgtgtataacgaaatactgcggtataaaattgaaaaacaaatcttaaagacacagaaattgaacctgtccatttggcatcgggatacatttaagcgcaatagtttcctaggggaggtggaacttgatttggaaacatgggactgggataacaaacagaataaacaattgagatggtaccctctgaagcggaagacagcaccagttgcccttgaagcagaaaacagaggtgaaatgaaactagctctccagtatgtcccagagccagtccctggtaaaaagcttcctacaactggagaagtgcacatctgggtgaaggaatgccttgatctaccactgctaaggggaagtcatctaaattcttttgttaaatgtaccatccttccagatacaagtaggaaaagtcgccagaagacaagagctgtagggaaaaccaccaaccctatcttcaaccacactatggtgtatgatgggttcaggcctgaagatctgatggaagcctgtgtagagcttactgtctgggaccattacaaattaaccaaccaatttttgggaggtcttcgtattggctttggaacaggtaaaagttatgggactgaagtggactggatggactctacttcagaggaagttgctctctgggagaagatggtaaactcccccaatacttggattgaagcaacactgcctctcagaatgcttttgattgccaagatttccaaatgagcccaaattccactggctcctccactgaaaactactaaaccggtggaatctgatcttgaaaatctgagtaggtggacaaatatcctcactttctatctattgcacctaaggaatactacacagcatgtaaaagtcaatctgcatgtgcttctttgattacaaggcccaagggatttaaatataacaaaatgtgtaatttgtgactctaatattaaataagatatttgaacaagctaggaaaattgaatttctgctgctgcttcaaagaaaaagctgccccagagcattaaacatggggtattgttaagaagcaaaatgttcttgtttgccatcatgtgtttcacaccacaattctgtgccacagttaagagggtctggtacccttgcaggacctttgtaggttgtgggaaaaagtcgcagaaagatactcaaagtggagcagggaatggagacagacatcagtgatgataaaaaaaaaaatggaccttaagaaactatttactctgtaatctctaataaaatatggaattccatattagggcaatgagactgaaactactggtgtttttctgccttgagaaaacaaacagttaaaacaagcctcaaatgtattttagtgccacccactggccataggtacaattcagttgttggcttgttttgacttaattctaaaataggtctcaagcctgtatttttatgagtttatttttttaaaaccctgcatatatatgattgtttttcttataactttactatatgaaagcagcataagagtagtcacaaacatgttttgcaacaaagttttaattagaatgtaagttgctcagttatactgttcttcttatgtatgtaaaattttcgtattttgtaaaaacccttagaataaattatcatttgatttaaattgtattagaaaattagcgtgacttctcattttaaataaaatattttaggaattctaaa

SEQ ID NO: 103 - protein, 339 aa, Homo sapiens
MAAAAAAALESWQAAAPRKRRSAARRPRRREAAPRGREAAPRGREAAPRGPEAEFESDSGVVLRRIWEAEKDLFISDFWSSALETINRCLTKHLEQLKAPVGTLSDIFGNLHLDSLPEESDVATDSIPREILVTGTCHLKCVCYGIGNFATCIVARNQLTFLLLLLEKCQIPRSHCWVYDPLFSQLEIEVLNTLGVTVLSENEEGKRSIRGEPTIFYMLHCGTALYNNLLWSNWSVDALSKMVIIGNSFKGLEERLLARILQKNYPYIAKILKGLEELEFPQTSQYMDIFNDTSVHWFPVQKLEQLSIDIWEFREEPDYQDCEDLEIIRNKREDPSATD

SEQ ID NO: 104 - DNA, 4020 bp, Homo sapiens
  source 1..4020: mol_type = other DNA
gacgtcagagaccaatggctgcggccgcagctgcggcgctggaatcctggcaggcggcggctccgcggaagaggcgctccgcggctcgacggccgcggcggagggaggcggcgccccgggggagagaggcggcgccccgggggagagaggcggcgccccggggccccgaggcggagttcgagtctgacagcggagtcgtgcttcgtcgcatctgggaggctgagaaggacctgtttatctctgatttctggagttcagcactagaaaccatcaatagatgtctcacaaaacatctggaacaactgaaggcccctgtggggactctttcagacatctttggaaacctgcatcttgactcattgccagaggagtcagatgtggccactgattctatcccaagagagatcttggtcacaggaacctgccatttgaagtgtgtgtgttacggcattgggaactttgccacctgcatcgtagctagaaaccagctaacgtttttgctgcttttgttggaaaagtgccagattcccagaagtcactgttgggtatatgaccctctgtttagccaacttgaaattgaagtccttaacacccttggtgtgactgttctcagtgagaacgaggaagggaaacggagtattcgcggggagcctaccatcttttacatgctccattgtgggacggccttgtacaacaatcttttatggagtaactggtcagtagatgccctttctaagatggtcatcattgggaacagtttcaaaggacttgaggagaggttgttggcaaggattctgcagaaaaattatccctacattgcaaagattttaaaaggactggaggagcttgagtttcctcagacttcacaatacatggacatatttaatgatacctctgtccactggttccctgtgcaaaagctagaacagctctccatagatatttgggagtttcgggaagaaccagattatcaggactgtgaggaccttgaaatcatcaggaacaagagagaagatccttctgctactgactgaactcgttgtgaggtactcagtgttggctgaggtagaagctgccaccagagactaaagggaaggctgctatggaggaactacagagaactcctttgccaggaaagaacatcaacttggctgtcctgttttgaggacgataccccacatgaggacttggtataaagattcctgccctacgtggcattgtcccattttacatccttccctcatgacctggcctgatgtggagtagctcctgagtaaagaagttacccttttgaaggtgatctaaaaatactgtttatttacagtacatccctcttaggggcaagtctctgactggttctggacctgccacagttcacttggccatgtcgatcaggctctgcagtgaggtgggcacccacgtcttctcgccctggacaaagaccactccccggtcgatgtagatcacaatgcggccaaaggtgtagagctgcttcccttcgtgtcgcttcccaatgacgggcatgaagacaatgttgtgctcctcagccttggtctcaatgaggtccttaaagttcatgggcacagagctagcggccacgccaatgcccctctgagccatgttctcagcctcccgcctctcctgcatggcctcgtactggaagtccttcctccgctccgtgtgggtgagataggcaatgttctcccgtgctcctggctgcatgtaggcacctaagatacaggaggacagggcggtgaggagaggtgtttccaggtgtatggaagttgacactgtggcttggcccaggtcttgggtgtgccagagtgcttgtgactcactgaagggcagctctgcctcaaagatacaactttggaggaagtttagacgactggccagtatcacataaaaactgttcagaaggttcctggctagtatctagtaaccagattattaatattcaacattttaaaatgaagtatctgcaagggatttcttccttcagagctggaaacattaacagagagtcctcagccactcttctgttcccaccttgctctgtagagtttccatttcccaccaccaaagaggcagcttttagtaccttgaaaacatagggcccatactggctttatttttaacctacccacacagggcccccatcctgaaagaagttcacatatatttagggagctgaaatgagtgtttaaaggataataccaagaccataaatgctaagtgctaattgaggggtatattcagggaacagttttggaaacatgaggccaagggtagctaaggaagagtttttagaaaaaacttgataattacagaagcagagaagtatatttgccttattacttaatctctgttttcacagaataggctatttttctttttttttttttgagaccgagtctcgctcttgtcacctaggctggagtgcagtgcttgcaatctcggctcactacaacctctgcctcccaggtttaagcgattcttctgcctcagcctcctaagtagctggcattacaggcatgtgccaccgcgcccggctaatttttgcatttttagtagagacggggtttcaccatgttggtcaggctggtctcgaactcctgacctcgtgatctacccgcctcggcctcccaaagtgctaggattacaggcgtgagccaccgtgcctggcctaggctattaaataacaagaattaaagactcaggaaatagaaattccagttctaactgccaccctttaactatgtgaccttgaacaggctctcagcctcgctgggcttatctgtaaaacacagactagacgatcccatttcaatgctgcgaatcggctaatgagcaacactggagcacaggactggttgaaataggctcccaaatgtagaaacataaatatactctcacttacttatgatctaggcagaatgacttacctagaacttgggaacagatatagtacacgaacagtgaactgcctgtttttgacaacacagacaccacctattgaaggctatacacaagcatgaactcactctcccttttagcctataaagtagatcttactgtttaacaggtaaaatggggctgattaaggctgagcaatcaccaagtgtcagaccgcgtgccaaactccacactgtaagatgcgtcacctaagcagcatgctcaggcatgaatgagccttaaaaggccacacagcacagtggttaagagggcggggcctggggttagactgacatcatctgaatccagcttaagtcagtctccactcagggaagatgcccctctcagtcatggtagacctgggcagtgggtgccagctgaccatgtaccccagtcagcagggtgagagtctgttgctatgtgcaaaagtgtgacctaaggtttaggctgcctacaggaaccagaaaactctgattctgtgtcatttacatgtgtaaaatctgaaacttggggccaggacatccaaaatgggaatcctcacttaccaacgttggaggacaccgcccggttcatgatatcaagtgcctcattaaatttgtccttgacagatggatgtgccagcacttggtctgagaacatcgacttccaacccaggtaccacttggtgatctcctcataatttgggctgttactgagccaagagcacagcacctgccaaaaagaaaaattacttgcatccatcgtggcaacaaatgaaggcaagatttctgaagtggccatttgttttgttttgatcctggtcctacaggctagtgacactactttacagggatttatagtagctaaacagtctagcacttatgaatatggattttggagtcagcctggtagctaaagtgcccttgcatgtaaactctctgagcctcagcttccatgtctacacaacagggataccatatcccctaccccatagggttgctgagaggagctgagataaagcaaataaagtgcttggaacagcttctgatacatggcaaatgtccaataaatggtgcccactatgaa

SEQ ID NO: 105 - protein, 262 aa, Homo sapiens
MKTPFGKTPGQRSRADAGHAGVSANMMKKRTSHKKHRSSVGPSKPVSQPRRNIVGCRIQHGWKEGNGPVTQWKGTVLDQVPVNPSLYLIKYDGFDCVYGLELNKDERVSALEVLPDRVATSRISDAHLADTMIGKAVEHMFETEDGSKDEWRGMVLARAPVMNTWFYITYEKDPVLYMYQLLDDYKEGDLRIMPDSNDSPPAEREPGEVVDSLVGKQVEYAKEDGSKRTGMVIHQVEAKPSVYFIKFDDDFHIYVYDLVKTS

SEQ ID NO: 106 - DNA, 4459 bp, Homo sapiens
  source 1..4459: mol_type = other DNA
gaggcgccgtctggctcaggctggggccggcgggagcgcgaacgagcgacggcggaacccgtgggcctgtggactgcagcctcggcggtcagcagagtgcttgtgatttcacgtatttttgctgaactcgtaaaagagacacttggatggtggattaaccagaacactaacattctgtgaaaagtttcaaattggagaatattgaattttcaccctagtccagcagctccgctgctcacttaaatacagatgaatgaagaccccattcggaaagacacctggccagcggtccagagctgatgcaggccatgctggagtatctgccaacatgatgaagaagaggacatcccacaaaaaacatcggagcagtgtgggtccgagcaaacctgtttcccagccccggcggaacatcgtaggctgcaggattcagcatgggtggaaagaggggaatggccctgttacccagtggaaaggaaccgttctggaccaggtgcctgtaaatccttctttgtatcttataaaatacgatggatttgactgtgtttatggactagaacttaataaagatgaaagagtttctgcgcttgaagtcctccctgatagagttgcgacatctcgaatcagcgatgcacacttggcagacacaatgattggcaaagcagtggaacatatgtttgagacagaggatggttctaaagatgagtggaggggaatggtcttagcacgtgcacctgtcatgaacacatggttttacattacctatgagaaagaccctgtcttgtacatgtaccaactcttagatgattacaaagaaggcgaccttcgcattatgcctgattccaatgattcacctccagcagaaagggaaccaggagaagttgtggacagcctggtaggcaaacaagtggaatatgccaaagaagatggctcgaaaaggactggcatggtcattcatcaagtagaagccaagccctccgtctatttcatcaagtttgatgatgatttccatatttatgtctacgatttggtgaaaacatcctagatgtcatcacaaactctgccaaatttgtggaactatgaaatgtattatttgtagacataaagacttgattgctttccagtttaatgaaagcttaaatgtccctgcgaacccacaatctctgccagcagaactggttttgttctgaatagtacagattgatgtgaacacaaagcattttgtgtaaggagaacccctttcttttaaaagaagtctgtctatttcgaggggagttacaggcaagtttggtaaaagttaagctagtatcatagtcatttaaaattgtaatagatcttaaccattttccccctcaccctaactctcttattctgccgccacaatgcaagcatagtttgatgttttcgttattgccttttttgagatgtatgtatctgtatctacctatatctatatgtgtgtatacatatataatatatacacacagatacaagtgtacacacacacaccacacaccacacacaccccactggcagtctttgtggattaggatgggggtgacataattttcttgagtttaacaggagtgctttacccaagtcagtcatggatatgatatcactgctctttatttaaaagtaaactttgggcacaggaaccatatgggaacattcagcttgtttaaaaaaaaaaaatcagaagttcagagcaccttttcaatctggagcccttaaaccataagtccaaatatgaattatttgtgaacagttaatgacccatattagaattttacaatctggtgaacaatctgggtaaaaggctacctttaattctaagcttcatttttttttgggggggggttacattttaatcataaattcttttttgcaaagcccaggttcttgttccacacagtgtaatgtaggtgtattttggacagcacatatggtccattgtgtacaagtcagtaatctggatttcagtacatggatttaaaaggcaacaatccatcactggtttgtgtgtttttggttaagtttctggaagaatacaatgcttttatattggaagtataagttttgagtggcattgttgccttctaacaagctctctgggacttttaaagttttattactattattgctaatgtatgattatggtcagagactttcaacccaccccttcctgcctacccctggcttttcctcacaaagaatgtctagacaaacagcagcttagtctcctgacacctcttgtggggtgcatgttcctgctccaggtatgctgttcatgtggattcattccattcagtggccccttggggtttgcatgccagtgaagcgttaccatagaagagccagccgtttgtgttcgcttggtaggtgtaagtaatagcagcccttagccacggagtctttatgtggtttattcctgcaaggttgttttaaactgaaatagaactgctagtgtgattggttgatcagcaaaacagctgctctcattttgttttggaggaaccctggtggtttgacagccaggagaaaggccatatgtgaaaccagtctcttgtggagattggaaatcctccctgatatttgggcagagcctaaacgtgcatgcttgtcactcaaacaccagaagtttgaatcagaggtctgagtgacctcttttgtggctgttcttgatggtttccaggcctcgttatgcatggtttgcttgatgcccattttttgtgccttgtgctgttggatggtaacgaccactcaccatgtaaacacagtacctcagttttctgtccacagctgcagtcgctctgtccctcgtgcttcactgtgggcagccagggacaagcttctgaaagcagtgtgatacccaagtcataggtgcttctcgtatgtgaacaggtgtcattctacagatctgttatgtgttttcctgttgactcttaagagtccctgcatgtaaatctcaaagctgagcctggctcccagagtccagactgacattacagcgcaagagtttgcaagtgtgtccagcatgcaccaactgtgcagaacttggctcggtaactttgcgtggaaaaataaagtacattttgaagtatcttgagggttgggtcaattgagacatttctagcattacttaatgacttgcattgtggtttttctgcaagcaactttaatgactttttttataccacatggtctcccagtttctagatgaatgcaacatgatgatggtgatgatgacgatgagtttaatcattgttcatttattgcctttagggctgagggaaagggaaggtttgtttttttttctccccattttcccccattctgtctttcttttggtgacttacaccacatgtaatgacgctatgactaattctgctcccaagcccttgtatcttgggcttcattttaggctcatgtgtcagatctgcatgcattgcttgcatttttctggtatctgaatgttggttccttgttccaggaattcaacattaatttccaaaagtatcatgggacttgtgacaatacaagacatgaatctatgtataaaatttatcggcctttctcatttacctgctctagtattattgtattgtgtgtgcgtgcgtgtgtgatgtcaggctgccacgtaaaacttcagagaaaaatcttaaaagcagaccatccttttttgcatgctctattctaagtagaatgttcaatgtaactgactaaaattgcatgttaaagatatttaggtttttttgttttctttatttttatttgttttcagtttcctgtatatttgcttactgtgccgttttagtggttttaggataaaaatgcactggtgaagcaaatgtagtgccaacagaaggtgattttccagttgtaaatgtcatgcagcatttgaagggactgtgttttcttaaaaaaaaatcacagttacttctaaaccagatttcatttcttttattgttttatgtgccaaaccacgaagtgcattgggcttcaatctctgaacactgtagacccattagaagactgttccgattgttacaaattgtagtgcctgaaaacactcttaagctgattgtcttaacaaaatgaaagttctccaaagacaaaacagaacaattattataacaaaataattatggttgaaatgtctgtggttccttggaaatgctgcgctctttgtgtttttccatcattagtgcagttggaatgaatgtgtataggtcagaggtcttcgtgttcacattttaaaattaggtaaatgacctcatctttcaagcttgaattcatttttaattttaattttattttatacaatgtgtagacagttccctgttctctgcatttagaagtatacacaatataaatctgttaattctgtaagtaatttttataattatgatgtaactctatcttatccttaaaacatttaaaataaaccctttatgtgcaa

SEQ ID NO: 107 - protein, 193 aa, Homo sapiens
MSDDDSRASTSSSSSSSSNQQTEKETNTPKKKESKVSMSKNSKLLSTSAKRIQKELADITLDPPPNCSAGPKGDNIYEWRSTILGPPGSVYEGGVFFLDITFTPEYPFKPPKVTFRTRIYHCNINSQGVICLDILKDNWSPALTISKVLLSICSLLTDCNPADPLVGSIATQYMTNRAEHDRMARQWTKRYAT

SEQ ID NO: 108 - DNA, 1783 bp, Homo sapiens
  source 1..1783: mol_type = other DNA
attgcctgtttaatagttgctgttgctgcacttccgcttctctcccagcgagagagagacacgagtggccaggcccagccgcagccgcagcagcagccgccgcggcggcacggaggagccagacacaaagagaggggctgtttgcggggtggggtggggggttcgctatgtcggatgacgattcgagggccagcaccagctcctcctcatcttcgtcttccaaccagcaaaccgagaaagaaacaaacacccccaagaagaaggagagtaaagtcagcatgagcaaaaactccaaactcctctccaccagcgccaagagaattcagaaggagctggcggacatcactttagaccctccacctaattgcagtgctggtcccaaaggcgataacatctatgaatggagatcaaccattctagggcctccaggatccgtgtatgagggtggtgtattctttctcgatatcacttttacaccagaatatcccttcaagcctccaaaggttacatttcggacaagaatctatcattgtaatattaacagtcaaggtgttatttgcttggacatattgaaagataattggagtccagcactaaccatttctaaagtcctcctttctatctgctcacttcttacagactgtaatcctgccgaccccttggtgggaagtattgccactcagtatatgaccaacagagcagaacatgacagaatggccagacagtggaccaagagatacgctacataaattggggtttcacaattcttacattatttgtctgtcacagaagagagctgcttatgattttgaaggggtcagggagggtgggagttggtaaagagtagggtatttctataacagatattattcagtcttatttcctaagattttgttgtaacttaaggtatcttgctacagtagacagaattggtaatagcaacttttaaaattgtcattagttctgcaatattagctgaaatgtagtacagaaaagaatgtacatttagacatttgggttcagttgcttgtagtctgtaaatttaaaacagcttaatttggtacaggttacacatatggccatttatgtaaagtccctctaagactacatactttttgtttaaaacaaaattggaatttgttttcccttcttggaagggaacattgatatttaacagagtttttagagattgtcatctcatatatataaaatggacacgtggctataaaacaccatataagagatgagtagtgcgttttattttatatgccaatctactttgtttaaaaaaggtctgaatcaggacttgtgaaaacctgtagtgaaataccttaagctgttaactaactgtaaggcgtggaataggagttgctcagtggattggttctatgttgtggactacttaagtctgcatttgttactgtgctaataaacaatattaaaaaccacctaataaacactgctgtgttcatttacttttcttttgccttttggttgccattcgcagattcttctgaaatcgataggtatctgcttctaaaacaagctaaaaataatgcatatttagtaggtattagttagttacctatattaggatctgtactttacacagctgtagatgaggtatcctagaaaaggttaaataatctaccccatttaggcttcaaagacgaaccctactgcatctttttaaaagcattttctgacttgcagatgctgtagtagcaagtacatgagaaatgggttccgtcatggataaattggtaccctgccttagggggca

SEQ ID NO: 109 - DNA, 2222 bp, Homo sapiens
  source 1..2222: mol_type = other DNA
agaacgcagcaactccgccggcgtttccatggtggcaagtggccggttccttgcggggctgagcaacaaagtagtatcagtgttcggtggctccactggaactacgcagagccagaccagcgggaccacagaatgggctgaggcggcggcggctgtttggataaagtcaacagcgggacgtggggcgtgacgccgtagtaaaagcccagcttgaaaatggagatgtatgaaacccttggaaaagtgggagagggaagttacggaacagtcatgaaatgtaaacataagaatactgggcagatagtggccattaagatattttatgagagaccagaacaatctgtcaacaaaattgcgatgagagaaataaagtttctaaagcaatttcatcacgaaaacctggtcaatctgattgaagtttttagacagaaaaagaaaattcatttggtatttgaatttattgaccacacagtattagatgagttacaacattattgtcatggactagagagtaagcgacttagaaaatacctcttccagatccttcgagcaattgactatcttcacagtaataatatcattcatcgagatataaaacctgagaatattttagtatcccagtcaggaattactaagctctgtgattttggttttgcacgaacactagcagctcctggggacatttatacggactatgtggccacacgctggtatagagctcccgaattagtattaaaagatacttcttatggaaaacctgtggatatctgggctttgggctgtatgatcattgagatggccactggaaatccctatcttcctagtagttctgatttggatttactccataaaattgttttgaaagtgggcaatttgtcacctcacttgcagaatatcttttccaagagccccatttttgctggggtagttcttcctcaagttcaacaccccaaaaatgcaagaaaaaaatatccaaagcttaatggattgttggcagatatagttcatgcttgtttacaaattgatcctgctgacaggatatcatctagtgatcttttgcatcatgagtattttactagagatggatttattgaaaaattcatgccagaactgaaagctaaattactgcaggaagcaaaagtcaattcattaataaagccaaaagagagttctaaagaaaatgaactcaggaaagatgaaagaaaaacagtttataccaatacactgctaagtagttcagttttgggaaaggaaatagaaaaagagaaaaagcccaaggagatcaaagtcagagttattaaagtcaaaggaggaagaggagatatctcagaaccaaaaaagaaagagtatgaaggtggacttggtcaacaggatgcaaatgaaaatgttcatcctatgtctccagatacaaaacttgtaaccattgaaccaccaaaccctatcaatcccagcactaactgtaatggcttgaaagaaaatccacattgcggaggttctgtgacaatgccacccatcaatctaactaacagtaatttgatggctgcaaatctcagttcaaatctctttcaccccagtgtgaggttaactgaaagagcaaaaaagagacgcacttcttcacaatctattggacaagttatgcctaatagcaggcaagaggatccaggtcctattcaaagccaaatggagaagggtatatttaatgagcgaacaggtcacagtgaccaaatggcaaatgagaacaaaaggaagctgaatttttccagatctgacaggaaagaattccattttccagaattgcctgtcacaatacagtcaaaagatacaaaaggaatggaagttaaacagataaaaatgctgaagagggagtcaaagaaaacagagtcatctaagataccaactttacttaacgtggatcaaaatcaagaaaaacaagagggtggagatggccattgcgaggggaagaatttgaagagaaacaggttttttttctggtagtgtcttttcttttacatagtccaaaaaatacaagatgacaactcttcccgttttatttatctacaatagaagtgtgatgtgagttgttgttaagacagccatccatgtgcatgagcatcatccagctttttttgttagcaaaacatttactgttttcttttcccttttaagactctgttgatgtgataatttgatttggaattataaagtcatctcttctctgccta

SEQ ID NO: 110 - protein, 592 aa, Homo sapiens
MEMYETLGKVGEGSYGTVMKCKHKNTGQIVAIKIFYERPEQSVNKIAMREIKFLKQFHHENLVNLIEVFRQKKKIHLVFEFIDHTVLDELQHYCHGLESKRLRKYLFQILRAIDYLHSNNIIHRDIKPENILVSQSGITKLCDFGFARTLAAPGDIYTDYVATRWYRAPELVLKDTSYGKPVDIWALGCMIIEMATGNPYLPSSSDLDLLHKIVLKVGNLSPHLQNIFSKSPIFAGVVLPQVQHPKNARKKYPKLNGLLADIVHACLQIDPADRISSSDLLHHEYFTRDGFIEKFMPELKAKLLQEAKVNSLIKPKESSKENELRKDERKTVYTNTLLSSSVLGKEIEKEKKPKEIKVRVIKVKGGRGDISEPKKKEYEGGLGQQDANENVHPMSPDTKLVTIEPPNPINPSTNCNGLKENPHCGGSVTMPPINLTNSNLMAANLSSNLFHPSVRLTERAKKRRTSSQSIGQVMPNSRQEDPGPIQSQMEKGIFNERTGHSDQMANENKRKLNFSRSDRKEFHFPELPVTIQSKDTKGMEVKQIKMLKRESKKTESSKIPTLLNVDQNQEKQEGGDGHCEGKNLKRNRFFFW

SEQ ID NO: 111 - DNA, 3026 bp, Homo sapiens
  source 1..3026: mol_type = other DNA
agtcccggggctgcagggagcgcagcgcgcgcggcccgggccccggccaccggacgccctaccggacacgaccctccctggagcttggacaactgcccacctcggacgctgcaccggacactgccccccacagggctggacactccaacggacactacttcccagctccggacattgctccctcctctcccggggccctggacgcttttccccctcccccctccgggggcccagacactgagcccccctcagcgtctggctagcgtccccttgcaccccagcccaggacactgcctcctccctgtcctcttctcccttctgctcctcccacctcatctttcccctgctcgggtcggagccccgccagttcctccgaccccctactgctcggccgcggctgcccgcgcccccatccgcagctcctcgcccggatgcctctccccgggggactatggtggcttctctgctgccgtcgaggcttcactcttctgcaccgggactacggggacggcgagcttagcggggacggggacgaggacgaggacgaggaaacctttgagctgcggaccccgagtccagcgggcggcgggaggggtcccctggaagtgacgctgactcagccagtgaggagcgggcctgtctccaacaggctgcagagctgggaggagacttggagcctcatcccggagaaagggctgccggaggacgacccggacatcgttgtgaaaggttggctgtaccgggagccccgcggaggaggggcgcggccctggctgcccccgcgccgagcctggtttgtgctcacgcgggactccctggatcagttcagcagcagcgggaaaggggcgcggcgtctcgggagcctcgtgctcaccagcctgtgctcggtgaccggcccagagcgcaggcgtaaggagacaggtctgtggtcagtgactgtgtctggtcggaaacacagtgtccgcctctgctccccacgccaggcagaggctgagcgctggggggtggcattgcgggaagtgatcgcctccaaggcacccctggagacccccacccagctactgctcagggacatacaggaaagttgcggggacccagaggccgttgccctcatttacctgaggaacccgattctgagacacactagtggagccttgtatgccccactcctgcccctgccctatggagtcagcgccccaggtccgggctatgcacccctgcgcgaggaggcggtgcggctgttcttggcgctgcaggcgctggagggggcgcggcgccccgggcccttgatgcagggtgtgctccaaacctgccgggacttgcccgcgctccgggatgaactcttcctgcagctggctaagcagacctcgggccctgcaggtccccccgggctcccggctacccaagaccctgcggccctgcggtactggcaactcctcacctgcatgagctgcaccttccgacctgggggagctgtgcgggggcacctcctggggcacttggagaggaccgagcaggcactcccggactcggaactggcggaatatgcgcgcttcatccggaaagcgctgggccggacgcgcggcagagagctggtgccctcgctggcggagatttccgcgttgagccaacggcaggagctgctgtgtaccgtgcactgtccgggggctggtgcctgtgctgtggccatcgactcccacaccacggcgggggaggtggctcgagagctggtggggcggctgggcttggcccggagccgcaacgcattcgcgctgtacgagcagcgaggggcccaggagcgagccctggctggggggaccctcgtggccgacgtgctcaccaggtttgagaacttggccgcggaggaagctgggttggaggactcgcccgactccgggtggagactatgtctgcgtcttcacggacctctgcaccctgaggggctgtccccagacggtcacgaactgcctttcctctttgagcaggctcacgctctgctgctgcggggccggccgcccccacccgacgacacgctgcgcgccctggcggcgctgcgcctgcagagcctgcagcgggacttctctccgcgggtgcccctgccccgcctggaccgcctgctcccgcccccggccccgccgcgcgaagacccgccccgcccgacccccaggccgcccccttccgctgccctgctggccggggcgctctggagcccgggcctggccaagaggcgggcggagcgggcccggcgcggcggggccggccgcactgcgggaagcattgcccgcgagggaggaggcggcgccggcacggcagctgccgtgctgggcggctggaagcggctacggggcatgggccgagctgaggccatggccgcctacctggccctggcggcgcagtgtccggggttcggcgctgctcggtatgacgttctggagctgagcacggagcctggtcggggtgctccacagaagctgtgcctgggcttgggagccaaggccatgtccctctcccggccaggggagacggagcccatccacagtgtcagctatggccatgtggccgcctgccagctaatgggcccccacaccctggccttgagggtgggagagagccagctcctcctgcagagcccccaggtggaagagatcatgcagctggtgaatgcctacttggccaacccctcccccgagaggccctgcagcagctcttctcctccatgccaagacctgccagacacctcccctcccagccagcgcccgggcctggacgagccccagggacagtctggctgcttggggcagctgcaggactgagcctgccaagaggtcacgacttccctcctgcctgcagcctgggccaggactgctctgagatttgagggaaacatggacccttttggccctgcagggacagggcacatcccacacccaagggctacaatgggtgtgggtaattttctagtttgtttcttaatttatttgtagaagagaagcaaaaaaaaaaaaaaagtttcttatttacacaaa

SEQ ID NO: 112 - DNA, 3884 bp, Homo sapiens
  source 1..3884: mol_type = other DNA
gaagaggaggaaggagggcgagcgaggaggatggcggagtcggggctcctgacggaactctaatgaatcattgattgaccagcactattttaccagttggaatgaatgatcagaaatgggcatagtgcttttagatccaacatgtaacagatggatgttactccatgctgattacttcttcaagccagtacttttttgattgtgtaggatctttgtctcttcatctttgaattcaattactggaaaataaaaggagttcatgtagtttttgtccaggcttgagtcaccatgagtagtagtttaggaaaagaaaaagactctaaagaaaaagatcccaaagtaccatcagccaaggaaagagaaaaggaggcaaaagcctctggaggttttgggaaagagagcaaagaaaaagaacctaagaccaaagggaaagatgccaaagatggaaagaaggactccagtgctgcccaaccaggggtggcattttcagttgacaatacgatcaaacggccaaacccagcacctgggactagaaaaaaatccagcaatgcagaggtgattaaagagctcaacaaatgccgggaagagaattcaatgcgtttggacttatccaagagatctatacacatattgccatcatcaatcaaagagttgactcaattaacagaactttatttatacagtaacaaattgcagtccctcccagcagaggtgggatgtttagtaaatctcatgacactggctctaagtgaaaattcacttaccagtttgcctgactctcttgataacttgaagaagctgcggatgcttgatttacggcataataaactgagagaaattccttcagtggtgtataggctggattctctcaccactctttaccttcgctttaatcgtataactactgtggaaaaggacatcaaaaacttgtcaaaactcagcatgcttagcattcgagagaacaaaattaaacaactacctgctgaaattggtgaattatgtaacctcattacgctggatgtagctcacaatcaacttgaacaccttccaaaggagattggaaactgtacacagataaccaaccttgacttgcagcacaatgaactgctagacctcccagatactataggaaacctgtccagtttaagtcgtcttggtctgagatataacagactgtcagcaatacccagatcattagcaaaatgcagtgcacttgaagaattaaatttagagaacaataacatttctactttaccagagagtcttttatcaagtcttgtgaaactgaatagtttgaccttagctagaaattgcttccagttgtatccagtgggtggtccatctcagttttctaccatctattccctcaacatggaacacaatcgaatcaacaaaattccatttggaattttctccagagcaaaagtattaagtaagctgaatatgaaggacaatcagttaacatcacttcccttggattttggaacttggaccagtatggtagaattgaatttagccactaatcagctcacaaagatccctgaggatgtgtctggtctcgtttctcttgaggttcttatcttatcaaacaatcttctaaagaagcttccccatggtcttggaaaccttaggaagttaagagagttggatctagaagagaacaaattggaatccttgccaaatgaaattgcatatcttaaggatttacagaaattagtcttgacaaacaaccagttgaccactcttcccagaggcattggtcaccttactaatctcacacatctgggccttggagagaacctacttactcaccttcctgaagaaattggtacactggagaacctagaagaactgtatttgaatgacaaccccaacctgcatagccttccctttgagctggcactctgcagcaagctttcaatcatgagtattgagaactgtccactcagtcaccttccacctcagattgttgctggggggccttctttcatcattcagttcttaaagatgcagggtccatatcgtgccatggtctgatataaatctgctggtcccacacactgttcaaaaatagactgccattaatgtttcttatctatatctgtatctatttatgtagatattggtatatggcagatttataaaaattgcattatgtgtttctgctaatagaggaatcatagccatttagaattttttttaaattctgtacaaaaggcttatataagttttctttgctgaatttgatggatgtttttctgttgtgtaatctgatatgccagtttgcttaaaacatttgccaacacattatgaagttattaaatttaagggacagaggtagtatagttagatatactttctcttaggaaaaataatgggcaaaaatttttgttgcaacttttcatatatattttccccttaccaattgttttatccttatagtattgtaggccctgaaagtagaatttttctttaacttattttgagatttgagatttaaattttatgtattgtttacagtcagagtaaatcactggatttcttttgtttgttttgatttgctctgttttattcagtcaaatctagagtttgaatcctctgctaaagaatttgcatccactggtgtaaacagtgaaaggtatttgcttgttgaaaaaaaaaactggcaaagtgaaaagatacagtcaaaaatctagaatttctttaattttgcttctctgacgagttgtgaagcaaaatacctgaagtgagtctttgggtaggggaagggtattgagaccttttctagtatgaatattttttaagtttgggggaagagaaacttgcagtgaaaaggagttttttcattcctgaaagttgcagatccacaaaactaacaggataattgggcaaataaattacatataaacacacacaatctatatatgtatatacaatgctatatagatatgtatttattatatcataaactacagtaggtaactttaaggatttcttcctatccttgtacaatgacatgaatgtctttctttgaaaactgcaatgtatgtatgtttcaaggttatttaacagtgtactatggttttatatcttgacttgccttgtacatctttcaattctggaatatctgtgtctaagcacaatatcttcacactgtgctgtattgctgctgaactaaatgcacttttccccacatatggggcactggcttcaaacaattcagttcagtatcattacttttaatctcatctttcctttcttggtagttgttaatacagttatggaaaagaggcacattgcatagaagccattggggagttcagtggaagttctgtaagatgtgcatgtactatttgatgcgttttctttgcttcactgcttttaatacttagcagtattgttggtctaagtcaatttgattattgaggagtctcagagcaaggtgcgttctagatgtcatcctaaaaaacacttcatatataattaatcactattttgtataattacatattgctgcttgtgtgtttttttttttttccatttagttgggcgttgtgttttacacaaaaccatttttgaattaaggctatgatattaagatagaaatttggactgttgttctgcttttcctggcactcaaattcatgactagttttgaggtcaaacctatgttcgtaatgagagattttataaggatcaactaagaaatggaaggcaggtgaagatataaaaccctagaatgcttaaatgtgctgtaaaactattgtagatgtcactggattttaccaagtaatatcctttcttttttttttccccccatctgctgtggcttttcagttaaaattttgtttataaaaggaatttgtttattacagctctaccta

SEQ ID NO: 113 - protein, 582 aa, Homo sapiens
MSSSLGKEKDSKEKDPKVPSAKEREKEAKASGGFGKESKEKEPKTKGKDAKDGKKDSSAAQPGVAFSVDNTIKRPNPAPGTRKKSSNAEVIKELNKCREENSMRLDLSKRSIHILPSSIKELTQLTELYLYSNKLQSLPAEVGCLVNLMTLALSENSLTSLPDSLDNLKKLRMLDLRHNKLREIPSVVYRLDSLTTLYLRFNRITTVEKDIKNLSKLSMLSIRENKIKQLPAEIGELCNLITLDVAHNQLEHLPKEIGNCTQITNLDLQHNELLDLPDTIGNLSSLSRLGLRYNRLSAIPRSLAKCSALEELNLENNNISTLPESLLSSLVKLNSLTLARNCFQLYPVGGPSQFSTIYSLNMEHNRINKIPFGIFSRAKVLSKLNMKDNQLTSLPLDFGTWTSMVELNLATNQLTKIPEDVSGLVSLEVLILSNNLLKKLPHGLGNLRKLRELDLEENKLESLPNEIAYLKDLQKLVLTNNQLTTLPRGIGHLTNLTHLGLGENLLTHLPEEIGTLENLEELYLNDNPNLHSLPFELALCSKLSIMSIENCPLSHLPPQIVAGGPSFIIQFLKMQGPYRAMV

SEQ ID NO: 114 - DNA, 2769 bp, Homo sapiens
  source 1..2769: mol_type = other DNA
cttccagtcacctcggcccggatcgggaagtgtcaagcgggcgctcccccatctccgccgctattaccactgaacccggaccccctacccaggtccagggccagccgccatgacgaacgtgtactccttggatgggattctggtgtttggtttgctctttgtttgcacctgtgcctacttcaagaaagtacctcgtctcaaaacctggctgctatcagagaagaagggtgtttggggtgtgttttacaaagccgctgtgattggaaccaggctgcatgctgctgtggcaattgcttgtgttgtaatggccttttacgtcctgtttataaaatgaattccaaagcacccaagtcatcaactgccaaccaaggggacggggatgaagaacctgttggagacctgaacccagtgtaggagagttcagctgaaatcatcggtccccaggatgacaccacagcatctgcccctgctatatgtggggaaaactcatggtcacgaacattatttatgcttcaggggactacagaaagccagcttcctttgatctatgtgtaaatcagtccttggcagagtgcatataatgtccggataaattacacccctcggtgataagattacatacctccttcataaaaacctgtcatcctgttttgttcttcagctcctcatcaggatcttttcaaactgaggctcattagggaaggaactaggctgtgttcagacttcttttgaagagagagaattttcaagacttcttttcactctttgatttggatctggcaaattggggaggggatgctgggtgggaaacagttatgaaatgccaagaaattctttggctttagaaatttatctttcatgtacccatccgggaacataaaagagaggcatagtgctcattgcaaaaagagaacagatgaagtagctgtgttatgtgctggtatcttgagagttttgccaagaaaatctgggcctacataaaatttgagaattatctgtgtgatgagaccagaaagcagtggcttagacaagaaaaaatctttctgttcaccagtatcctcaaatggagacttcacttgatcagatggtatatgaaaaatgaatcaactattgctatttcgtaaaacctttttatattttctaaatttacttagtgctaaatactgttactcagttttaaatgccacgactaggggaaaaagaaactattgaagaaataattgtttagtatatttgcagttggggtagaagaaagaaatctagtatattgattcatatactagtaaattcatctagtataagaacttgtgatgttagattgaagttttgtcatcttataaaagacaacaaacttattttctgtttaagtctgagtgttatggcaatttttagttgattacttatttttcttagccaaattttaattttcttcatattgcattgctctttagttgtctctggaaattctatttactttaaggacatgagaaattcaaatgagagaagttgctgatattcatcagtgtgtttggacagttcatagggtccacaaatcaaatgaggttgtttcctgaagtagaagaaaacagaactttgcaattgatactgaagtactttgccatggagttagtaactcctgagcagaccattttagatggctcagcatttggcaggaagacttctccattccctgcttatatctatggaaggatcagctgttggatgtctagaacttctctatttaaaaaaaaagagtaggtctaaaattaaattattataagcaagcatagacatgggtcttccagttgaattgtccattaccgtaaaacttaatggtggacaagttagctgtggttgattcctgtgtggcagtaaattgtcttctgtctgcttactccaaataataaaagctgctaggaagtttagattttgaaataggcagtttaatgctttgagggtttctagaaatacagaaagtcatcaagtaaacactgcatgtctaatcatctcagagttgtggctgttatctcttcaggaattggtccacagggtaaatttcaacaattcatacgttttccattgtcatttctgaggacctttgagatgagagaaaggaaatctagtggaacaggaaagagagttacaccttgtgggtgtgagtttgggacctgttggcagaagggaatgtcactccctggaaacaggttcagcatgtttgcacttgttattttgtagctttaatgatttttgttttctaatagggcaaatgtctctaagcttggtgtttagagctgcttcatattttaaactagttccattccacagttctagttcaaaccagtttttacagcctcctgggtgggtcgtcttgacccaaactcttgtgttgttacattttgagaggttttcataccagaatgtaccaaaaagtgcacaaggtaaaggtaatttacagccagaaacaaatatacatttgtttcatttcttgactttccctaagcagataagcagaaacttgtttaactcattactttgtttgatgtgtcttacatatttttgactaaaagttatagaatgttattcctctgggggaatcttttacaggtggaggaatggggatagcagtattgcctcagattcaaactggcatcaccataaaccctgtaggccagggtggaatgaagtcagctcctttttatagttgaaatacaattttttattcaccattgtctgcacaaatccttgaaaataaacctttttttccctaca

SEQ ID NO: 115 - DNA, 3773 bp, Homo sapiens
  source 1..3773: mol_type = other DNA
agggcgggacttgtggcgtcttcgcagcggtcattttggctgccctcccggaggtccgttctgtctgtcagccgctttggtacgctgcatcgggatcgaagtgacggaccgtgaaggcgcgagagtcaggtctgagggtcgggggcagagccgcccgcgaggccggcctggggatagcgatgctcgggttccccccgggtcgcccgcagctcccggtccagctccgcccacagactcggatggcgaccgcactgagggacccggcttcggttcccatagctacagaggtgcttttcaaacttacacagggaagtgtgacctttgaagatgtggccgtgtacttctcctgggaggaatgggatctccttgatgaggctcagaaacacctgtacttcgatgtgatgctggagaactttgcacttacgtcctccctgggttgttggtgtggagtggaacatgaggaaacaccttctgaacagagaatttctggagaaagagtgccacagttcaggacttccaaagaaggttcatcttcccagaatgccgactcctgtgaaatatgttgcctggtcttgagagatattttgcacttggctgaacaccaaggaacaaactgcgggcagaaactacacacatgtggaaaacaattctacatcagtgcaaatcttcaacagcaccagaggcagcacattacagaggcacctttcagaagttatgtggacactgcctcgtttacacagagttgcatagtccatgtgtcggagaaaccctttacctgcagggagatcaggaaagacttcctggccaacatgaggtttctccatcaagacgccactcaaacaggggagaagccaaataacagtaacaagtgtgcggtggccttttacagtggaaaaagtcatcacaactggggaaaatgcagtaaagcctttagccacatagacacacttgttcaggaccagagaatcctcactagagaaggactttttgagtgcagtaaatgtgggaaagcatgtacgcgaagatgtaacctcattcagcaccagaaagtccacagtgaagaaaggccttatgaatgcaatgaatgtggaaaattctttacctactactccagtttcattatacatcagagagttcatactggagaaaggccttatgcgtgccctgaatgtgggaaatcgtttagtcagatatacagcctcaatagccataggaaagttcacactggagaaaggccttatgaatgtggggaatgtgggaaatcttttagccaaaggtccaacctcatgcagcatcgcagagttcacactggagaaaggccttatgaatgcagcgaatgtgggaaatcttttagccaaaactttagcctgatctaccaccagagagttcacactggagaaagacctcatgagtgcaatgaatgtggaaaatcctttagccgaagctccagcctcattcaccaccggagacttcacactggagaaagaccctatgagtgcagtaaatgtgggaagtcatttaagcaaagctccagcttcagttcacatcggaaagtccacacaggggaaaggccttatgtgtgtggggaatgtgggaaatcctttagccatagctccaaccttaagaaccaccagagagttcacactggagaaagacctgttgagtgcagtgaatgtagcaaatcctttagctgtaaatctaacctcattaaacacctgagagttcacactggagaaaggccttatgagtgcagtgaatgtgggaaatcctttagccaaagttctagcctcattcaacaccgcagagttcacacgggaaaaaggccttatcagtgcagtcaatgtgggaaatcctttggctgcaaatctgtcctcattcaacaccagagagttcacattggagaaaagccttagctgtactgagaatatgcaatttccttttagtgtaattatactgaaggagtacacctgtgagagagacaagtacctgatttggaagccccaacatctaaggatatacagtgggcggattccccttaagttccaggtatgtgttacactttctaacatgccatttagaaagtgttagactttctcacctgccatttatggctcttgccgtttatgtcactgacagtttctgaggcagaagccgtatcatgtctaccacctgtgaggtccacacagtgtgtatcatttacctcctgaacctgctcaaggaagcagacctctgcttctccccatttgctagaagaaatcatgaatagtctgagtcttcctctctgacaagttagggcatggacttgacccagctttgtgccagagaacccaatatgagtgttgttggcagcttgccaagaaggactgtctttttcaagacatactggtttcatgtgacacctccatggatttttttccagcctctaagtcaccaacttgggaactgcttgtctcacgttgctttgttttttacaataataaaagcattattatttaagctacctttatcttggcatttgattcactctttgaggtggttcaaaaacagaatcgggccctgccagctttacagagtaaacacctttggagggagagggaggtgtcatatgcctcagtgacaacagtataatggaaaaatacaactgtctttccagctttggcctaatctgaatttgaattattgcccaaggccttctaggaaatactgcaggatattatggtcttaattcgtggactggatgcaaggattttttgtgggctcaaaggacaccctgaggaagtgggaaattgtgacaaattccattgcttctgggaacaagatgaattttgttgttattcacaagggttattacatactgcccagcactgttgaggcagtctacccccagtgctgccaaggagccaagtgccccaatacaatttagtaggctactgtcactgtaaaatgatgggggaaccataattggtgtggaaacactgggttactagggagtgaaggagactgcagcaaactagatggaatgtgctccttgtaatatgttctagtaattgtgcaggatcagtgtgtacagacattcttagaatttccaggcatgtgtattttttgtagctgaggtgactgtcaaaaaataataaacaacctaaaggttttgtgtattccaatagcctttctgggatgtgcacctcaagaacattgctgcataggccaggaaaacaagcatagaaagaaggggcgggggatgtccttccaggaatgtgactttgtaacctaccatcatcctgtgtttaaatgaattcaaatcagtttcattgattaccagtatttgctgcccactgaggcaaggtgtccctccaaggtcatcaggaaagagagttaatgtagggttaccaaacctagtcaaaaacacattataccatcattataattattacaatgaacatatcagtcacctcggatttacctcaggcctttttctaagctctccctcccctctctggccctcaaggcaaccattgatttataccttcatttataataggtttgtttgtattttctataatatatgattttattaataaaatgtctttttttccagtttcattcatgatgcataattattttgagattcttcaatggagcttatatgtggtggtcattctttttattgctgagtggtatattttttatggatatactatttgttatccatttgtttataagcatttaggttttatctagttttggctattacaaataaagctgctagaaatgta

SEQ ID NO: 116 - DNA, 9589 bp, Homo sapiens
  source 1..9589: mol_type = other DNA
gaggaagagaggcgagcggagagtggaggaggaggcggcggcggcgggagcggtccccaggaatgtcgctgccgccgccaccgccggggccgctgccgttgaggaggagacggaggagaccgacgttgttaggaagatgatccctatgatcttgaagatgtttctgcacagaaatgagggaaatacaaagaaccaaatacagttctgaaatttgggatctgtattttgagatgattttattttcagaatgagaagcatatctggttacctttatgaatgtagagacatgagaagagagttatgatggcaaaaaacaaagagcctcgtcccccatcctataccatcagtatagttggactctctgggactgaaaaagacaaaggtaactgtggagttggaaagtcttgtttgtgcaatagatttgtacgctcaaaagcagatgaatattatccagagcatacttctgtgcttagcaccattgactttggaggacgagtagtaaacaatgatcactttttgtactggggtgacataatacaaaatagtgaagatggagtagaatgcaaaattcatgtcattgaacaaacagagttcattgatgaccagactttcttgcctcatcggagtacgaatttgcaaccatatataaaacgtgcagctgcatctaaattgcagtcagcagaaaaactaatgtacatttgcactgatcagctaggcttagaacaagactttgaacagaagcaaatgcctgaagggaagctcaacgtagatggatttttattatgcattgatgtaagtcaaggatgcaataggaagtttgatgatcaacttaaatttgtgaataacctttttgtccagttatcaaaatcaaaaaaacctgtaataatagcagcaactaaatgtgatgaatgcgtggatcattatcttagagaagttcaggcatttgcttcaaataaaaagaaccttcttgtagtggaaacatcagcacgatttaatgtcaacattgaaacatgttttactgcactggtacaaatgttggataaaactcgtagcaagcctaaaattattccctatttggatgcttataaaacacagagacaacttgttgtcacagcaacagataagtttgaaaaacttgtgcagactgtgagagattatcatgcaacttggaaaactgttagtaataaattaaaaaatcatcctgattatgaagaatacatcaacttagagggaacaagaaaggccagaaatacattctcaaaacatatagaacaacttaaacaggaacatataagaaaaaggagagaagagtatataaatactttaccaagagcttttaacactcttttgccaaatctagaagagattgaacatttgaattggtcagaagctttgaagttaatggaaaagagagcagatttccagttatgttttgtggtgctagaaaaaactccttgggatgaaactgaccatatagacaaaattaatgataggcggattccatttgacctcctgagcactttagaagctgaaaaagtctatcagaaccatgtacagcatctgatatccgagaagaggagggtggaaatgaaggaaaaattcaaaaagactttggaaaaaattcaattcatttcaccagggcagccatgggaggaagttatgtgctttgttatggaggatgaagcctacaaatatatcactgaggctgatagcaaagaggtatatggtaggcatcagcgagaaatagttgaaaaagccaaagaagagtttcaagaaatgctttttgagcattctgaacttttttatgatttagatcttaatgcaacacctagttcagataaaatgagtgaaattcatacagttctgagtgaagaacctagatataaagctttacagaaacttgcacctgatagggaatcccttctacttaagcatataggatttgtttatcatcccactaaagaaacatgtcttagtggccaaaattgtacagacattaaagtggagcagttacttgctagtagtcttttacagttggatcatggccgcttaagattatatcacgatagtaccaatatagataaagttaacctttttattttagggaaggatggccttgcccaagaactagcaaatgagataaggacacaatccactgatgatgagtatgccttagatggaaaaatttatgaacttgatcttcggccggttgatgccaaatcgccttactttttgagtcagttatggactgccgcctttaaaccacatgggtgcttctgtgtatttaattccattgagtcattgagttttattggggaatttattgggaaaataagaactgaagcttctcagatcagaaaagataaatacatggctaatcttccatttacattaattctggctaatcagagagattccattagtaagaatctaccaattctcaggcaccaagggcagcagttggcaaacaagttgcaatgtccttttgtagatgtacctgctggtacatatcctcgtaaatttaatgaaacccaaataaagcaagctctcagaggagtattggaatcagttaaacacaatttggatgtggtgagcccaattcctgccaataaggacttatcagaagctgacttgagaattgtcatgtgcgccatgtgtggagatccatttagtgtggatcttattctttcacccttccttgattctcattcttgcagtgctgctcaagctggacagaataattccctaatgcttgataaaatcattggtgaaaaaaggaggcgaatacagatcacaatattatcataccactcttcaattggagtaagaaaagatgaactagttcatgggtatatattagtttactctgcaaaacggaaagcttcgatgggaatgcttcgagcatttctatcagaagttcaagacaccattcctgtacagctggtggcagttactgacagccaagcagatttttttgaaaatgaggctatcaaagagttaatgactgaaggagaacacattgcaactgagatcactgctaaatttacagcactgtattctttatctcagtatcatcggcaaactgaggtctttactctgttttttagtgatgttctagagaaaaaaaatatgatagaaaattcttatttgtctgataatacaagggaatcaacccatcaaagtgaagatgtttttctaccatctcccagagactgttttccctataataactaccctgattcagatgatgacacagaagcaccacctccttatagtccaattggggatgatgtacagttgcttccaacacctagtgaccgttccagatatagattagatttggaaggaaatgagtatcctattcatagtaccccaaactgtcatgaccatgaacgcaaccataaagtgcctccacctattaaacctaaaccagttgtacctaagacaaatgtgaaaaaactcgatccaaaccttttaaaaacaattgaagctggtattggtaaaaatccaagaaagcagacttcccgggtgcctttggcacatcctgaagatatggatccttcagataactatgcggaacccattgatacaattttcaaacagaagggctattctgatgagatttatgttgtcccagatgatagtcaaaatcgtattaaaattcgaaactcatttgtaaataacacccaaggagatgaagaaaatgggttttctgatagaacctcaaaaagtcatggggaacggaggccttcaaaatacaaatataaatctaaaaccttgtttagtaaagccaagtcatactatagaagaacacattcagatgccagtgatgatgaggctttcaccacttctaaaacaaaaagaaaaggaagacatcgtggaagtgaagaagatccacttctttctcctgttgaaacttggaaaggtggtattgataatcctgcaatcacttctgaccaggagttagatgataagaagatgaagaagaaaacccacaaagtgaaagaagataaaaagcagaaaaagaaaactaagaacttcaatccaccaacacgtagaaattgggaaagtaattactttgggatgcccctccaggatctggttacagctgagaagcccataccactatttgttgagaaatgtgtggaatttattgaagatacagggttatgtaccgaaggactctaccgtgtcagcgggaataaaactgaccaagacaatattcaaaagcagtttgatcaagatcataatatcaatctagtgtcaatggaagtaacagtaaatgctgtagctggagcccttaaagctttctttgcagatctgccagatcctttaattccatattctcttcatccagaactattggaagcagcaaaaatcccggataaaacagaacgtcttcatgccttgaaagaaattgttaagaaatttcatcctgtaaactatgatgtattcagatacgtgataacacatctaaacagggttagtcagcaacataaaatcaacctaatgacagcagacaacttatccatctgtttttggccaaccttgatgagacctgattttgaaaatcgagagtttctgtctactactaagattcatcaatctgttgttgaaacattcattcagcagtgtcagtttttcttttacaatggagaaattgtagaaacgacaaacattgtggctcctccaccaccttcaaacccaggacagttggtggaaccaatggtgccacttcagttgccgccaccattgcaacctcagctgatacaaccacaattacaaacggatcctcttggtattatatgagtaggaagtgattgcaaacaggctggatttggacaaaaagcaaatctagacatgcatgtttcagggttcagtagtatacttcatgtttcatacagataattcacattcaaaattacattttctctttgaactagatggtattccttattcacttacattacaaatctaagaccatgtgataagcatgactggagaggtttaatttttataaacaaaaatagctataaagtacaaagctgctgctgcatgcaaccttattgcaatcagtatatcattcctgtggcaatttctgtcaccttatattgtgaataaaatttttctatagaaattaaatgatttaaaaactcacctatatgaaacatttaatgcttttcagcctgctttctggctgattttgttatttgatgtgctaatttgggcaacttaatttacattctggcagtcggtgtagataactaaaagcccagttaagtattttataatttcaggctactgaggccatgcttgggatgttgtttgaaagaaagaaaaaatacacttgacatatttcacatttctgtaccttcatctttacttccaagtaaacccgtggatgatttgatgagggataaatgaacctatttcttttacacacataccaaggacatgcttgtggctaaagtgagttgataatgttgtgcaaaggatagttgtcaccaactcatttctttatggtccataatgaaataaaaattttgtatactgttaattctgtaaacagatgcatgttcaaaagatctatgatggtcttgtaatcttaatctaatatattttagatattttaattttttccctcttggggaacacatttagtatagtgtagaaaatacttccatgacattttcatataaggttatataacttttcatacataaacatgaaatttgttgtagaaaattctttaaaccaaacatttaaatctaggacttcaatttaatttgttccttgaatctatttttatgtggcccttaaaaaatatccaaaaaacccattgctaatatagcaataaaaatactttgggtactgacagactctttggagtgtttatattacaaatttgtattcatattcttttctgtgatgtgttgtactaaaatccaaaatggcttttgcaccatttttaagccaattttttcctttgatgttggtaccagaattactataagtgactgctgcttttgggggtaaacattttgttagtgaagataaaaccagaacactaaattatggataaaattttcagaataggtggcacaggtaaatttcactaggttatattttgtgtagtaaagaaaaaaattatttggtcaatgttatcttaattcatactacaatttaagattatcttatgtgtattatagtaaatagatgattttcagattcaaggctcctaagagtttgatttgctctgttttttcctaaaataaatattgtctctcccaactgttaagttctaggtattgtacttccaattttaacttcagaaccaagatgttggcatgaaccaggctgctgttgaagtacatgtatattataaattatcttatttgtgttatactcttacatgttatcttttctaagaaaacaaagtccctattattcctattgcaaagcacacaggaattaagaaagtacagtaatttttaaaaaaaaatccggtaaatgtagtattcttaacctgttctatattacttatacctattgtctatatagctttaatttatagttgtcagtttaactattggcatgtctggcaaagaaaattaaactttaagagttttataaactgtttctaggttgctaaagaatttatttttctactatatatggtatagacaaagcatcaaactatgtacaggaaaaaagcctgactatttctatttggaagtaggctgaaaagagaattttcaaaactgttcgtgtcttcagttcattctgtcataactttgctattgtaatatgtgaataccagtttatttaagctgttctcttttatactgtattaatttaatgttcatctgcgtttagtaccatttttgttattaaaactggcatttaccgtttttcacattaacccaccttgcaccttcccccaaacttatctccacttttctatgcattctatcattgatttgacacacttcatagtgagtcatttaaatactctacgtttggttcaattaaccagtaggttacagttattgaaaattaaagtacagtttaaagctcagtctgttacactgaattgattgtgtttgtttttgccaagggtttagatatgcttttaaatattagaaacatctaagaacagaataacataattaaacttttttctggtaagttactggaaggtttcactgtttagggacctatcatatgagacttcttaaaggattaaaagaataggatagtctcataattgtgagtaaacatcaaggcattatattttacaatactgaataaaatttcatctacacacatgttgccattgtttcatttaaggttcagtgcttatagttaactacaatattggacctaacaggatctagattagcaatataaagaagcatagtggtactctgtttcacactttcagtagatttattagaagtcaaattctattcaacagacacttattaggatatacaactaatttaagaataaaattccaggcacaatatattttttttaaatggtatttgttagtagtgcttcttccccttaacatttacagtgtaaatactgcaggtaaccgcaatctaagttagccaaaaagcagctttttttcccatactgtatgtaaataatgtagacctgggtttttttgtttatttgggtttgtttttttttttgaggtactggaatctaattaatatctcttaggtatcaacaaaagggaacaattggaatgagaatttaggccttagcttccatggtgatttttagttttttatacagtaataattgtgatgctatttgtcaactggatataaatacacatataattttaaaaagtcaaaagtgcttttgtttctttgtttaatgtaatttttgtgcttcacctacaggatgctgcagtaaattaaatatcagtgaagcttctgatgtataaagaatgctatgaataaaacattaagaagctgtgtaattttaagttatagttgcctctatttttaccatttcattggtaaaaattagctaatttttttcaagtgaaatgaaaaataaaaatataaatttatcaatatgatggaaatcttattaaggagatgtattattgaattttcactgtacctgaaaaggagattcaaaattttttctggggatgtatataggtgaaaatttgattttttaaattatcaggaaaacaagataatgcacagatttctaagactaagatcttacctggatgtgatttttgagctgtggctagacattctttagagccactggaaatattttgaaaactattctagttatagcagagctgctaatattaacgaatatatttgtgtcttcatggtttgtgactattaggccaaattttgtggtatatgttgtcagtctggatctggtgaggtctgttcaacatgaatctttgtgttatcttgaatttagtagtttcaaggtacttaaattcttaacagtttctaatttgtttcaatacatatgggacatggttgatttttttactgtattagaactcttggaagttcttagccttttcaggttatgaaatacctgaaagtaaaattttctaagatttaataagggaagatactattcaaatcattttcttaggatagcatctttacatacaatgagaggattgtacaagcattaatctcatattccaacatccagttacttgatgtgatccaagtaccctggtctttttgaagcagttaaaatctaattaattaactttgggagtcttcactattcaattgatcctcatcattgtcctatttgcatgactccattttttcctccactatatgagttttctttgtcagggggagaggagtgggaagagtcacagaatctcatattcacatcttaattaaattgtgtgaaattagtcttttgtggaaattctgtaggcagtatgattttgaaaagctaaccaatgataattagcattttagttaatactaaatgcataaaattataacccttgaaattaatttggtgctggcagttctggtttagtcatttttaccagtagttagtagtattaagacctgcagtatatgcactttttgagtagctgtcaaataattgtagttgagaaacaacttgtttattctcacaattcagattttctattcagttttgtctcaaatagtaagttattgtgaacaatttaataacggccctcctgttctagtttgcctaatattttagttaagatttagtgttttaacctatttttttaagtttattttttgtattagattttatttgaataagttatgtgggtttagtaattgacctatttattcattgcttcactaattcatccagattagttttaagtgtgtatatgtatttgctcaccagatcattttcttgggaccttgaactgtgaatgttttgtcctaaccatttaatattttctaggtacttgctgcaagttcttgaactattttaccagctttaactttggggctcttagtttcttttctccagattcttgttattttattttatccaaataaatatttaggtgttctaagaa

SEQ ID NO: 117 - protein, 1502 aa, Homo sapiens
MMAKNKEPRPPSYTISIVGLSGTEKDKGNCGVGKSCLCNRFVRSKADEYYPEHTSVLSTIDFGGRVVNNDHFLYWGDIIQNSEDGVECKIHVIEQTEFIDDQTFLPHRSTNLQPYIKRAAASKLQSAEKLMYICTDQLGLEQDFEQKQMPEGKLNVDGFLLCIDVSQGCNRKFDDQLKFVNNLFVQLSKSKKPVIIAATKCDECVDHYLREVQAFASNKKNLLVVETSARFNVNIETCFTALVQMLDKTRSKPKIIPYLDAYKTQRQLVVTATDKFEKLVQTVRDYHATWKTVSNKLKNHPDYEEYINLEGTRKARNTFSKHIEQLKQEHIRKRREEYINTLPRAFNTLLPNLEEIEHLNWSEALKLMEKRADFQLCFVVLEKTPWDETDHIDKINDRRIPFDLLSTLEAEKVYQNHVQHLISEKRRVEMKEKFKKTLEKIQFISPGQPWEEVMCFVMEDEAYKYITEADSKEVYGRHQREIVEKAKEEFQEMLFEHSELFYDLDLNATPSSDKMSEIHTVLSEEPRYKALQKLAPDRESLLLKHIGFVYHPTKETCLSGQNCTDIKVEQLLASSLLQLDHGRLRLYHDSTNIDKVNLFILGKDGLAQELANEIRTQSTDDEYALDGKIYELDLRPVDAKSPYFLSQLWTAAFKPHGCFCVFNSIESLSFIGEFIGKIRTEASQIRKDKYMANLPFTLILANQRDSISKNLPILRHQGQQLANKLQCPFVDVPAGTYPRKFNETQIKQALRGVLESVKHNLDVVSPIPANKDLSEADLRIVMCAMCGDPFSVDLILSPFLDSHSCSAAQAGQNNSLMLDKIIGEKRRRIQITILSYHSSIGVRKDELVHGYILVYSAKRKASMGMLRAFLSEVQDTIPVQLVAVTDSQADFFENEAIKELMTEGEHIATEITAKFTALYSLSQYHRQTEVFTLFFSDVLEKKNMIENSYLSDNTRESTHQSEDVFLPSPRDCFPYNNYPDSDDDTEAPPPYSPIGDDVQLLPTPSDRSRYRLDLEGNEYPIHSTPNCHDHERNHKVPPPIKPKPVVPKTNVKKLDPNLLKTIEAGIGKNPRKQTSRVPLAHPEDMDPSDNYAEPIDTIFKQKGYSDEIYVVPDDSQNRIKIRNSFVNNTQGDEENGFSDRTSKSHGERRPSKYKYKSKTLFSKAKSYYRRTHSDASDDEAFTTSKTKRKGRHRGSEEDPLLSPVETWKGGIDNPAITSDQELDDKKMKKKTHKVKEDKKQKKKTKNFNPPTRRNWESNYFGMPLQDLVTAEKPIPLFVEKCVEFIEDTGLCTEGLYRVSGNKTDQDNIQKQFDQDHNINLVSMEVTVNAVAGALKAFFADLPDPLIPYSLHPELLEAAKIPDKTERLHALKEIVKKFHPVNYDVFRYVITHLNRVSQQHKINLMTADNLSICFWPTLMRPDFENREFLSTTKIHQSVVETFIQQCQFFFYNGEIVETTNIVAPPPPSNPGQLVEPMVPLQLPPPLQPQLIQPQLQTDPLGII

SEQ ID NO: 118 - DNA, 21679 bp, Homo sapiens
  source 1..21679: mol_type = other DNA
agtagcgatagcagcggccgtggaggtggcgttggggactgttttctctcggaggccggagcggagccgcgtctgactgaggcgggcagcaagcggccccctcgctccctccctccctcctccgcgccctccccgccgccaccagccgtcaaacgccaaccgccgctcctggggaggagccgcggctcgcggggccggagccaggcctgcgtccggacatcagccggagccggagcgagagccggggcctcggcgtccccgccctctccccgcctcggccagcgtccgccgggcccccgcgcgtcgcgccatggactcggacgagggctacaactacgagttcgacgaggacgaggagtgcagtgaggaggacagcggcgccgaggaggaggaggacgaagacgacgacgagccggacgatgataccctggatctgggcgaggtggagctggtggagcccgggctgggcgtcggcggggagcgggacggactgctgtgcggggagacgggcggtggcggcggcagcgctctggggcccggcggtggcggcggcggcggcggcggcggtggtggtggcgggccggggcatgagcaggaggaggattaccgctacgaggtgctcacggccgagcagattctacaacacatggtggaatgtatccgggaggtcaacgaggtcatccagaatccagcaactatcacaagaatactccttagccacttcaattgggataaagagaagctaatggaaaggtactttgatggaaacctggagaagctctttgctgagtgtcatgtaattaatccaagtaaaaagtctcgaacacgccagatgaatacaaggtcatcagcacaggatatgccttgtcagatctgctacttgaactaccctaactcgtatttcactggccttgaatgtggacataagttttgtatgcagtgctggagtgaatatttaactaccaaaataatggaagaaggcatgggtcagactatttcgtgtcctgctcatggttgtgatatcttagtggatgacaacacagttatgcgcctgatcacagattcaaaagttaaattaaagtatcagcatttaataacaaatagctttgtagagtgcaatcgactgttaaagtggtgtcctgccccagattgccaccatgttgttaaagtccaatatcctgatgctaaacctgttcgctgcaaatgtgggcgccaattttgctttaactgtggagaaaattggcatgatcctgttaaatgtaagtggttaaagaaatggattaaaaagtgtgatgatgacagtgaaacctccaattggattgcagccaacacaaaggaatgtcccaaatgccatgtcacaattgagaaggatggtggttgtaatcacatggtctgtcgtaaccagaattgtaaagcagagttttgctgggtgtgtcttggcccatgggaaccacatggatctgcctggtacaactgtaaccgctataatgaggatgatgcaaaggcagcaagagatgcacaggagcgatctagggcagccctgcagaggtacctgttctactgtaatcgctatatgaaccacatgcagagcctgcgctttgagcacaaactatatgctcaggtgaaacagaaaatggaggagatgcagcagcacaacatgtcctggattgaggtgcagttcctgaagaaggcagttgatgtcctctgccagtgtcgtgccacactcatgtacacttatgtcttcgctttctacctcaaaaagaataaccagtccattatctttgagaataaccaagcagatctagagaatgccacagaggtgctctcgggctaccttgaacgagatatttcccaagattctctgcaggatataaagcagaaagtacaagacaagtacagatactgtgagagtcgacgaagggttttgttacagcatgtgcatgaaggctatgaaaaagatctgtgggagtacattgaggactgagaatggccctgcataaaatgaactctgaaaactttaccatctagagtgctcatgcaattaaaacaaaacaaacacaaacaaggaggcactaagcctattctgacaccactggtctgtagtaccagaattgttttgttaatggaaagtttaagtaaattatattgtaataaaaaggtagataaaccattgtacaacagtattctaggccaccaacaaaagtgtgacagacacactaaaagccctccaactttaacttgtaacgtagcttcattctcaaagctgactccttttttttctttttccttttcctgagtgtagtacagttaaaatttcaaacagctccttgacactgcttttcatgttcaaaccagccattttgttgtactttggtaaaggacctcttccccttcctcccctacacatacagatacacccacacacagactgactctctttctctcataccccaaggtcatgagtgaatgatgcttagttccttgtaaagaaaatcttgggatggggaaaggggtaggcagcaagaggattcaacaaacgaaaaacataaaaactttgtatatgacttttaaaacaagaggacaacacagtatttttcaaaattgtatatagcgcatatgcatggacaaagcaagcgtggcacgtgtttgcataatgtttaattacaaaaaaatatttattctttaaaaatcttcaagattatgtctatttgctgtgcattttctttcagtttgcttatctttcccgggttggggttgggataaaggtgtgtcggtttagcacctctggaagacctatctagagctctttcactttcctgaggttattttgccctttctggtgttggtatgtctgttgccggccatgggcctcatgccttgaattcctgctcttgatcagggacaagggaggtcaagctctgactaatgccatgacctgattaaggggtacagcagggagttttgttgctacagctcatgaattaacctgtcccaacctaatccccctccatggcatcatgcctctacccaagcctttgtgtgcccatgttatgcacacagctgtaggcattcttaagtcccctgtcgcatccagtggaagcattttaaaatttcttttactttttggttttcccttaattgctgcttttcagattttagttatggctcgtctgctcaccccttctctacattagggtgtcaaagagaatgttttgctttaaatataaatagccattcatttagtctcagattgtgaatttaaaatggtggataccgaaattgcttgtgtgtgttgctgtgggtttggtttgaaggcaaacacccctagaacatgatattcccatctagtgcatttaaatagaaatcactgagtttgctgcttttttattgtcagcagataggagaattaataatgcattttagctgtgatgtccatttttatgaaattcctactaagagctatgttaaaagtaaaggatggtggtggttgtattaactatatacctgtttaggccattctggctgtggtatttttcaataggtcagcatctgtaaatctgtcagttttatacaggagtgcagagtgaactaggcaactagattaagaggtctaaatatgaaataccagttgaggctgaggacctcttcgtcttcctttaaatgtcttttgcctagggagtgtttaccatttgtgaggcagctttgtctgctcttacactgtacatcctattactccattgggaagtaggttcactttcctctggccttttgcctaagttaggctttgctgaatcaaccctacttttccttttagaaaaggttgttacaggagatttactggcaactgttcttttcccatcaaaaatcagtgaatgtttgctgagtataaatgctgcttccttaaaccacttgtcgctttaggatcaactttacctgtaccttttctcctttcctcccttgccacctcaggtgcaaatctgaactcagtgtctgcttcttccattttctcgtctctctcccctcttcccccattatccatatgacattattttacttcaaatgacagcatcaatcttaaaaagatatacattaaaactaaggagtttttttaaagaaagcctgaataagttcctttccctggtaactttgaaaagcagtcagagttgctatatagatatatgtggctcctttaaaatgctttgtgtatgtgtggtgtttaaaaaaaaaaaatcttaccagttaactttgcagtgtctaggtttgagtgtcataaatccacgtgttcctgttgcaacaaatacccaaaaattgtgtgtgcacttcctaataccagtcttcacccatggaggaacagtgctttttagagatgctttctatttcaatgttggcatactgcctgagggtattgcagttgtgggtgcattccctaatttgtatgatcaagatgaactggcccttttctacttccaagcttttaacagataccaccatatttgacagaattcccagagtgaattgcttgtgttattagtagattcagtgcccccagctgggataggcaagccatgacagcttccctgtttcacctacagaagtcttatctgagggatctattcacagtaagcaccaaggtctccatgtcttgaggtcagtttcattgtcttttgaaaagtgcatgcttcatttgaacaattcattcagcagcagatggactttcagtgatttaaaataaaattttgatccaaagctcaggacacaaaccacagtggtaaaattgagtagcatataatatcagactaaattatctgtaattttccacaacccagattgtatgtgttttatgtgtgtttaaataaatatgttagatacacgtgtatacatacacccatatacaacagatccaagactggctgacttcatttgaaatggttgaatctgctgtgtaataaagtggttcaaccatgattaggaactgaaatttagtagaagagggaaaaggagttaatgtaacaaattattttagctacaaaccccggtaatagagcacttgggggatgggatggggtgggttggtgagacaatcagaatggtaaattgattaaatgctcctaaccctgtaattttgtgcatagagcaccctatgctgtggaaataactgttcttagatttcattgtaactggactgttcaggttgcccagagggaaagaacattcctaattctaataaaataaacttttattttgttattccattagttacttatgtttatttttatagttaaaaaatgactaaaggtggctaatagccacccgtattatgtgccttattcactgttcccacttaatataaaatgtcaaaaattggttgtttctttgcagggaactgtgaatgagcccattcccccaacatttaacttggttaatgaagctttcagagcattttctgaaagatttccaatttctgcatctcagatattgaatttaaattgtttgtgttgtaacagtgatacaaaaatgttcaatagctctttgaatgccactttttttaaagaaaatactttaaaagtcattcttagctaacctcaaaactcctttacattactttcattttagctcactcttaaagctgatactgttatatagggatgaagggagagttttcttaaagaaggtcccaaagttgaagatcgtttgtcattgatactctggccaagtccaggttttaggacaatttaatttactcttatttggatctgtaattatgggagtttatcacttttcctcttcaaagcacttcaacttactgtctaaaacaagtggagaagaaattgccattttttataaaggaggaagataaggctcactgaggttaaataactccctcaatttttcatttccttctacctgaaacttaacatcatgctacctctttgtatcatattttgttattctggtcacagaatgacctagtattctgtaccagggaaggtagttcttaactatattgtacttttaaaccacattaaagactattataaatgcctatcactgctactgttagaggttgctctatactatctctgatctttcatttgttgcagtttgcaacacagtagttgagaataagtggtttagtatgatttgcttaatagtacccaagtaatttgcagttgttggtttagttattcaaatgaatttccattgtaaagaattttggatagtctgcaggaaattgttacaggatgcacagaacatcccatatccattggatctcagcctttgaggctttaaaaagatgataagcagtgagttttatgagaaaattttggctccttcagaaacaggaagataagtgggcccctcagatttttcatatatctttggggataaagttggttatatctggtttattttagggattttgcttctgtagttacccaagatcaaatagccaactcagaaatactcagttggatatcaatcaaatagtgcctaccaggggagtaaacagacaacttttaggtttttagtttttgcttttgtgtggagttgagtccaatttttaaggcaactattgttgacctttctctaggcggtagcatttaggatgggaaaaaataatatgagttatgtgcgaaaagcagttttcaggctatcatttagggccacagatatgcttatttaggactattttcagggtaggagccagttaaagtttgtatatcagtcacacattgatatgtagcagctctatcaataccacaacaaccttattaccatagtaattcaggggtctcaagtaatccaggagtctcaaactgaaatgtcaacaagagccaagtaaatattttagaaatagagtaccctggagtagatgggctctgagaggagcctgtgaaatccagacttcatgtgaattctcttaattaaatgtgggccaaagaaaacccggccatgggcagtttttttttcccagcttctactagtcttggcttgcaacaatgccactgtccatctggcattacctagaccagtgatacttaaacttgactgcgaattggaatcactgagaagctttaaaaaatattagtgcctgagtgttactttatggagattatgatttaattgctttgggtaggcatcagtaatttttgtaaagccctttacgcattctcacccctaattccagccggtgattctcacatgcagactaggttgagatccttgatctagactgccttctatagttgcaaaaagagaatataggcgagcaactccagatcataagggacaaaatgattcaaggcaaattgactggctcagaatagggcctcactggaggccctagttgagtgggttttgtggaatggtgcctcccaagggtctggtgtgcagtgcccaatttggttttttgttggttttctggtaagtggtccaccttggagaaaatcacaaaactaaaagtcttaccaagaagtagaactgacaagcagccatgttgattggcagtacattctcttaccaagggggagaaatctatctagggaaaataatacagagtctgagcaaaggaagttgagtggttataagcaaaactgtcattaaagctagttgcgtcaagtctgcacaattccacgagcacttaagagtttacaagtttctcatgtctatcattcttttgataatcttgtatttttatttcaagtgtggtatagtagtaagaatattggtatttctcagccatagatttcccttttgtaaaatgggaatactaataggaactgtaatttgttgagtgctttttgccagatgccttacttttgtctgtatcttccaagcagccctaaagcaaaatgggcattgttaccctatttttatgaggaaagacactcatatactactaacttactcaaaagttacacattgagtgtataacagggccatgcttgtctgattccatatgttcattctattatgctgctgttgtctgttacataggaatattgtgaggatcaaagaacatgtgaaaacaaaacctagttacaataataagcacaccagtgctaacttgggcaaaagataaggatacagagctgtctcagagactcccaaaggcaggatgagattgggaactagaaaaccattttggacccctaaagtggtattgtctactatctgtacatcattctcttacagctcttactgctgcttttcctgtcagttaccccatagctccaggtattacatgttaactgttcctgacacatgtagacagaaccaatcagatccatggggcaggatcatcaatacaaacatgggtgttgagagcttaacttaatcgggaaggagatcttggagatcatagttcgctgggttcacatcatggaaatcgtctttgacaaaactgaaatgccctgaagttttaattttttaaatacatgtaatgaattggtatatggtagatactcgtggctacttagtatttaccaaatgctttgtttccatctcgtttatttttattttttatttttttaagagacagtcttgctatgttgcccaggctggacttgaactcctagtctcagccaaccccttctgcctcagcctcctgagtagctgggatcataggcatgtgccactgctcctagctcttccatctcagtcttatgatgtagttactattttcattttataaataagaaaatagaagctcaaataaaatgggtagtttccttgaggtcatcctgttagtaagtggtggaatgaagttacaaacctaggttttattggtcagcacacacagtgccgggcactggcagtacagcagtgaacaaaaggtctgttggtttgtctgaagctctcaaccttgattctgcatagactcggtggattgcccaaggccactcaaccagttaatatcagagccagctctgctgtttgaccagtatattattttcaccatgctgtatctgcttctcagtcaccaaaagcaccagctaaaattgtatatagactgattaggggacttccaacctaagattgtcctggaaacttaattcttatcttggctcatctcttcaaaacagatgcctctttcgttggtgacctcagatacactgttcagaagtactcaaagtattccttttttctcacatttgagagtcactctagcattttaatgagttaagcaagccagccctgcatttccaaacccttcccagaagtctaaccttactttgatctgatgacatgggctttttaaaagattactatttttttagaggtggggtctcactatgttgcccaggctggaatataatggctattcacaggcacagttagggtgcactactgccgtgaactccaggactcaagccatcttcctgccacagcctcctgagtaacctaggactataggtgcatgccaccatgcccagctgacaatggctttatatacataatatttcctcagcaacaatttatgtcttatttggcacctgtaaaaccctcttcactgattatgcctgtttaaaggtttggtatttactccaagtcacctgcctttagccatggagtattcaagtttctttcagaatgagaatttggagggtgctcatagaaatataaaacaaggctgggcatggcggcttacaccttgtaatcccagcactttaggaggctgaggcaggtggatcacgaggtcgggagttcgagaccagcctggccaacacagtgaaacctcatctctactaaaaatacaaaaattagccaggcatggtggtgcatgcctgtaattccagctgctcggaaggctgaggcaggagaatcgcttgaacgcgggaggtggagtttgcagtgagccaggatcacaccactgcactccagcctgggcgacagagagactctgtctcaaaaaaaaaaaaaaaaaaaaaaaagaagaagaagaagaaatacaaaaccaactctttatagtagacagtttatcccccagaaagctttttaggctgaaaacgtttctatagattttggatttccttctgatagctaaaatttgtttctgtataacagagtagtgccctataagccagttcagtgcacattaaatggctgttcttagaattatgaatctgaggcttatgcagtgaggctctagctctctggagtcagttggtcaagtgggattcctgaggactgagcaaacacacacagagcaggattttgtcctaagttttcttagggatcctatccaaaaacaccattacttgaatttcccagcttccttttacagggagacttccttgctatgtgtactcccacctcggtatgtcaaatcattttctcagaggaagtacagcataaaataataaccagcatttgtagagcacttcttgtgggccttcttgggcaaatagacattctcatggaatgctctaaaattgttaagttcttgcacttgctctcaagtcatttataatctaattgctggtcttcctggtatgaacaaagatgtttgcttgttaataaattcctaccacatacccagacttgtggtttatttctatctaactagggaaagcactaaagagttttccaataaggaagaatgatctgagtgtctacctgctttggaaaagatgtctgccatggataggaaatgattttgtatcccaaaatcctagtactaatttggagtgttgtaaaggtcagggcagcaaatgctagagagtgggattaatgaaaagttatagtgttctgcatgcctttgaataattaatttttactccatttttactcgcttgcaataaagtaggttaagtgctgtactttaaggaagtccatgtacaagccagtgccttaacaatggtcaaatggttgctcactaaccaatggaaataaatgactgttgtttccacaaaattgctttacagattctaaatgctatctctgggacactggattgtgtgctctttaagataaattccataatcaagggcctggccctgaatagattggagcccaaaaatctcactgaagcaaagagataataggccagtaaagagtgggagacaaacactcctggaataggaagccactactcacctttattttaaattgatatatagaaattaatattacaaaatgcacacatcttaagtgtgaagtttgatgttttgacagttgtatacgtctgtgtaataactaccaaaagaagacataatatgttacaattaacccagaaaattctcaagtacttttaaatcacccctgagcacctccccactccagtgatcacttcttgatttttatcactaaagatttgttgtacctgcttttggattacatataagtggaatcatataataatgtactcttttgcatctggcttctttcactgataatgctttaaagacacgcatactgtatgtattaggacattgttctttattgctgagtagtatttcattctataaatataccacaatttgtttattcattctcctattgaaggacctttaggttgtttccagtttggggcaattatgaataaggatgctatcgatattcttacacagccttttgtttttgttttttgtggatatacatcttcacttgtcttggataaataagagtagaaaattactgggtcatatggtaagtgcatgtttataagaaactgccctcttattctccaaagtggttttaccattttgtactcctatcagtgatgtatgagagttacagttgcttcacatgtctgtcaacatttacactgtcactgttttttatattagccattttagcatatatgaaataactgattttaatttacattacatttccctgattaatgagttgagcactttttcatatgcttatttttcatttgtatatctttcaagaagtgtctttcatgtcttttctcattttaaagttgggtgtctttttattgtaggtgttattctttgtattttgaatataaatcctttgatagatatgctatgattttttaaagactctatgtattcacttattgggatctttcgatgaacaaattttttttataaaatccactttatcagttttttattttatggttttatgacctcaaagtcacaaagaatatattttcttctagaagttttatggtttgggattttatgtttaggtctgtgatccatctcaaattaatttttgtgaacagaatgaggtttggtttttttccaacatggatatacagttgttccagcaacatttacttaaaaagacttttctttacccattagattgacttggtagcttggttaaaaattgatcacgtgtgtgtgtatttctacattttctgttctgttccattaatctatttgtgtatccttacatcagtaccacactttggattattgaaactttctagtaagtctttaaattagtaaatccttcctttttgttatttttcaagatcgctttggttattgtcgattctttggattgtcataaaagttttacaattagctcatcttgtttttcaaacgtagatgtgctgggttagctgtgttcatgccactgcattccagcttgggtgacagcaagaccctgtcaaaaaaaaaaaagaaaagaaaaaactgctagaatcttgatatggggttttgttgagtctataggtcaatttagaatgaacattttaatagtattgagtcagctaattcatgaacatattaagtcttgtcatttatttaggtattaaatttttttctcagcaatgttttgtagcttcccttgcgtaacacttgcttatcttacattagactttttcttaagcatttgatttttaaaatatttttgattttcttttctttttctttttttctttttttttttttgagacggagttttgctcttgttggctaggctggagtgcagtggcgcgatcttggctcactgcaacctccgcctcccgggttcaagcaattctcctgcctcagccttttgagtagctgggattataggcacacaccatcatgcctggctaatttttgtatttttagtacagacggggtttcaccatgttggtcagcctggtctcgagctcctgacctcgtgatccaaccaccttggcctcccaaagtgctgccattacaggcgtgagccaccgcgcctggctaattttcatttttaagttgtttgctgctagtatctagaaatacaattgattttttgtttgtttctttagagatgggtctcactatgttgcccaggttggtcttaaactcctgagctcaagggattctcatgcctcagccacccaagtagctgggactttattcacgtgccagtgtgcctggctgatttttgtatgctgatcttgaatcgtgccaccttgctaaattcatttattctagaaatagttcttgtagactccgtagagttttatattaaatagatacacaacagtgtagtctgcaaataatgtttttacttctttttctgattttatgccttttcttctttttttttttttttttttttttttttgtctttctccactggctacaatatctagtgcaatgtttaacgtgtggtgagagcagacaccttgccttgttttcttaatcttagggataaagattttaatgtttcatcactaagtataatgttaactgtaagtttttcacagaccagcccaaagaagttcctttctattcctaatttgttgataatttttattaggaagggttattaaattttgtgagatgcgtttttagcttttaataagattattatgtatttctctttttattttgttaagatggtatgttacaggggttggcaaactgtggcccatgggccagatccagcccatggacagttttgttgttgctgttttagagacagtctcactcttttgctcaggctgccaggctggagtgcaatgacatgatcatagctcactgcagccttgagctcctggactcaagcgaccctcctgcctcagcctcctgagtagctaggaatacaggtgcatgtcaccacaccaggcaaatttaagaaattttttgtagatcttgccgtgttgcccatgatggtctcaaactcctggcctcaagcaatcctcctgccttggcctcctacagtgctgggattagaggtgtgagccaccacacttggctctcatggactgtttttgtttttgttttgagacagggtctctgtcacgcaggctggagtgtggtggcatgaacgtggctcactgcagcctcaactttcttggctccagcaatcatcctgcctcagcctcccgagtagctgggaccacaggtgtgcgctaccacagctggctaatttttctttttcatttttgtagacatggagtcttgatatgttgcccagattgatctggaactgctaggctcaagtgatcttcctgccttgcactcccgaagtgttggcattacaggcatgagacacagtgcccagcctattgcagtgttttttgttttttctgttttttttttttttttttcatctttgtttttgtttttttgagactgagtcttgctctatctcccaggctgtggtgcagtggtgcaatctgcaacctccgcctcccaggtttaagcgattctcctgcctcagcctcccaagtaagtgggattataggcacatgtcaccaagctcagctaacttttatatttttagtagaaacggggtttcaccatattggccaggctggtcttgaactcctggcctcaggtgatctgcccaccttggcctcccaaagtgctgggattacaggtcactaggcgtagtagggctactacgcctggccctactgcagtttttaataagagatgagttctctcagcttttgtctataagagaatgtccttacttttatttttgaggggtattttagttggatataggactctatgttgaccttttatttcttctttcagtactttaaagaagttattttattgtactcaggcctcatttgtttctggtgagaagtcattcatcattttaatttttatttcctttccgtaatgtgtggttgttctcaatggctgcatctgtgcattatatttacttttcagtagattgactagggaatgtctaggtatgtttttctttgtatagagtttactgaacttcttggatctgtgttgatgtctttcattaatattggttctttcttggccgttatccgtttacatttttctcttgtctcatactctcttgcttctcctcttctttggagattctagttacatgtatattagatgatttgatataaacctacagatctcagatgatttttcccctgccctgttttctttttgttttcagtttggatactttccatttaaccatctttaagttttttgatgctttccaatgttaacctgttaaacttgtttattgaattctccatttaaaaatttttatttttagttatttatggatacatagttgtactgaattattcatttctaatatttttatttctagcatttcattatatttgtatagttacaattttctgctgaaatttcctatttcttcatgcatgttttccacattttccattctactttttagcattttaatcagttattttattgggttttttctgttttttctttcatttttaatcagttattttaaggatccaaactgataattcaacatctgggtcttttctagttctgcttctattgagcccttcctctcccttaccatgaatcttattttcttgcttttgcacgtcttgtatatttgattggatgatggacgttttatgttgaaaaaaaaaagaaattgaagaaaatgtttacttccaaaacagagcatgccctttgtttttttttcaggccacttgaatggtggctcaatctgatgtatatgaattctagactggggcttcactgcagttttagtttgattcagtttgcctctagcttcaaatatttgaaggaacgtagaatcagaactctcatatcaccagggcctgagttttgggcattggcaagattccagagatctgactttgcttcatagctaagccaccagcttttatcaatgtgggagatctttccctactttacaaccttgctgccaggatttttttttttaatcaatgggctggggataggaggatctttctcagctctcatgtgtgccctgcccttttgtagaggaatgcccacaatgcctaggggatgggtttctcagcatttctgaccccatttaggctccaagagtgcctctgttggatttcacaacaatcctgcctcccctttcatttttaaagggtattttgcccttgggagaagtcaagctctctcagcgttccttctattatccacacctttagtgtactacaccttcctgtacctggttatcatctaaggggtaagattggtgggaagccttcctctgtggatttgggtcatctaggttctaatgtcaaaccagcctccaaggggttgtgaaaatgttgttaaatttcagcaggtttctcttttctcccccctgtagtattcctcttcctaccatagttcaactaggaataacaacagctagggggtctcttctctcctatgaaggacttggcactttctggagtttggatcatttaggtttctttggtttttgtttttattttgagacagggtctcactcttacccagcctggagtacagcctgtagtgatctcagctcactacaacctctgccttcctggctcagttgatcctcccacctcagcctcctgagcagctgggactacaggcgtgtaccaccacacccggctaatttttgtattttttgttgagatagggttttaccatgttgcccaggctgatctcaaacttctgagctcaagcgatctgcctgcctcagcaccccaaagtcctggggttacaggcataaaccactgcacccaacctagatttctttgtgtccttagctttctgatgaattaaacatatgttttattttctagctcatctggccttttgttgttgtttgctagagtgggaggtatattccttgtgactttgttcatatcactagtgaatttcagaagtaggagtttatttttttaataaaaaatttttttaggtcaggcacagtgtctcatgcctgtaatcccagcactttgggaggccgaggcaggtggatcacctgagatcaggagtttgagaccagcctggccaacatagtgaaaccccaactctactaaaaatactaaaattagccaggtgtggtggtgggcgcctgtaatcccagctacttgagagactgagtcaggagatttgcttgaacctgggaggcggaggttgcagtgagccgagattgtgccactgcactccagcctgggtgacagagcaagactccctctcaaaaaaaaaaaaaaaaatttttttttaaacacgtctcactgccacccaggcttgagtgccatgacatgatcatagctcactgctggcttgaccttctgggctcaagtgatcctcttgcctcagcctcttgagtagctgggaccacagtcatgtgccaccatgcctggcttttttttttttgtagagtttgggtctcgctatgttgcctgtgatcctcccaccttggttttccaaagtgctgggattaaaggcatgagccaccatgcctggttaggaatgggagtttaaacaatggttttatttacatatttcattagctagtatttttttcttttttgagacagagtctggctctgttgcccaggctggagtgcagtggcacgatctaggctcattgcaacctctgcctcgtgattctcgtgactcagcctcctgagtagctgggattacaggcgcccgccaccacacccagctaatttttgtatttttagtagagacagggtttcaccatgttggccaggttggtctccaactcctgacctcagttgatccacccgcctcagcctcccaaagtgctgggattacaggtgtgagccatcgctcctggcctcattaactgttttcaaaagtaaaagtacatggataatacaaagttaaattttgtagaatcataaagaaaagcaacaccttcccatcttaactcccctagtgcctctactccctccacagagacaaatatcttaccagttggttgtgttttcttttccaaactgtatttctaaaatgtgtcaatatctcttccttttattttttattttttgtagagacaggggtctcactgtgctgcctaggctggtctcaaactcctggcctcctacctcgacttctcatagttctggcgtgagctactgcacctggcctcccccttattatttttttaaacatgaatggaagcatactatattttctacactttatttgttttatgtaactattttaacaacctgaggacttttacaggctgcataatatgtcttaatatggatgtatcttagtttatttaaacagttactggtgatggacatttccatgtttccagtattttttctcacaaacaatgcagtattatgcctttgtccacattcaccattgattgctattgagtatatctgtagcatcaagaataggcatactgaaaatcctccatgaagtccagtgaagcttcatattattttgaagtgatatttcccagtgttggctggactctcaagcgtttgtggtataggttttgggaggactggacacttccaaagagaaataagatgttacagacttgtccagcaggtggcatcagaacaaagctggctatggaccttgtcagtacaaatgataaaacattaaaaatgtaaaaactcaactgtagctccttgtttatacatatattgggggtgttgaaaagttaccgatgcctgattcctcttctatgtcctcagcccccaccataaaaatagataaatgccattttttttgtatgcccagcacagctatatgatttgaataatcttgataagcagggtcacatttgaggagatttgctaagggaaatgaagatccatctgtgacacaagaaacatgttctatgtgatttctgggattttcctgtgaacatacttcttgtttgtttgttttacagtggatctcactctgtcacccaggctggagttcagtggtgcaatcatagctcactgcaaccttgagctcctgggctcaggagagcctctctcctcagtctcccaagtagctaggactacagacacatgccatcatgccaggctcattttaaaattttttgtagagacgggtctcactatgttgctcaggctggtattgaactcctgggctcaagcaatcctcctgcctcagcatctcaaagtgttgggattacaggtgtgaaccatagtatccaacctattatgtttttttaaaaagagattgttctaattatgtatataattaaagtacattaggtttagtgattgcaatttgagaaaccaatgtcctttcttattgaaaaaggccctggtacagaaagtgttctatcttcctcacaagatctgaggtcaaaggagagattttgaaacattatagcaatggcttctagttattgaataaagaatgtcatttgctcctcacaggacccctttcagggagatttcacatattgggaaacagcctcatgagctttctacaaacatctttgtccttaagtcttcccatttcagtaattggctgtaccactcatccagcagctttcaaagtaagaaacctggcaatcttcctttaacatccatttccctttccctcattcccccatatccaatcatgtgtattggaggtttttccacctctaaacttgagaacccatttactttttctccatctcctttgccatcacactagtccaagtgaagtgtttcatcatctcatttgcagcatcctttagtttaccctagattatcaatttttgtccccctcccaattcagtctctactcatgagctaacatgagtttattaagtgttcattctgaccatgccattccttgctcaaaattctctagtgccttcccaatgcccttaaaataaaattcctcatatggcctttgtggatctgcactcctacctcttctcctattgcaaccaaccctgttacctttttctcttttcacactggtcttcattctgtgctgcaaactggctgagattcttccatcctcagggcctttgcacaagttcttcctttgccttagaattctttcctggcctgcacatgtcttcatcccctttccctaagctaatgccttaccctttaggtctcattttaaacatctcttacccaggaaaaatttccctgtccaaacaagtctagattggctccccattgtttgttctaactgttctatatttctccttcttagcatttatcacaattcttggtatgttgtgcttttcactttcttagtcgctattattggagtaggtaatacatccatatagtacaaaattcaaaatgtattaaaggtatagagtaaaaagtcttctcttccctgtccccccgctacccagttctcctctttagaaccacttttagcattttgaatatccttccagaaatattttctaagtatacaagcaattatgtatataatattcctctttatttttgcctttttattaatacagatactatatgcattttctgcactttatctgttaataatatatcttggcaattattcaatattaatatgtaaatagttgcctctttctttttcatgcgccatataatatggacttataatttatttaacctctatctaggttggttttaggcattggttattacaaataatgctgcattgaatacctttgtatgtaaagtcatttcccacatctatgcctatagaataaattactagaattgaaataattcagttaaagattatgtgcatttttaattttggtagttattgccaaactgctctcaatggaagttttatgaattcccactagtgaatgcatttgtcctcacaattatgtcagtgaaatttttgttctttgccaatgcaagaaatggaaagtatctcttggaaactaatttgcatgttttttttccttgcacagttatattttcatatgttaaagagccatttgtatttcttggtgaattgttcataaactttgcttacttattatctaatgtctgactaatttgctacactctaaattcccaattcatacttaagtctcgcccttgcaatttagatgtacaatctgcctcttcagtggtttccacaccaaaaaatccacaggctcctgaattttatatgggcctaagagtcttactgaaaattggaagtcttaaggtgtagtctattttatgcagtgtgaggcctttcatgctctgaaatgtaccactcttgactgactttttcttcttcaccctgtccggcactgtgcccttattagccagagaaatgttccccctttctcccaggaaacgttctgaccttaccctggtccctcaaggactctccttctcccccaaattaactttcaaggagtttctccaacccaaaatggcacccttcctgaaaagatttctagtggatactgttttctgtacctcactacggatgtattttgctgcttggctccccgtctccattttgctatggcaaacatttttttccagaaatatatcagataaaatgaa

SEQ ID NO: 119 - protein, 557 aa, Homo sapiens
MDSDEGYNYEFDEDEECSEEDSGAEEEEDEDDDEPDDDTLDLGEVELVEPGLGVGGERDGLLCGETGGGGGSALGPGGGGGGGGGGGGGGPGHEQEEDYRYEVLTAEQILQHMVECIREVNEVIQNPATITRILLSHFNWDKEKLMERYFDGNLEKLFAECHVINPSKKSRTRQMNTRSSAQDMPCQICYLNYPNSYFTGLECGHKFCMQCWSEYLTTKIMEEGMGQTISCPAHGCDILVDDNTVMRLITDSKVKLKYQHLITNSFVECNRLLKWCPAPDCHHVVKVQYPDAKPVRCKCGRQFCFNCGENWHDPVKCKWLKKWIKKCDDDSETSNWIAANTKECPKCHVTIEKDGGCNHMVCRNQNCKAEFCWVCLGPWEPHGSAWYNCNRYNEDDAKAARDAQERSRAALQRYLFYCNRYMNHMQSLRFEHKLYAQVKQKMEEMQQHNMSWIEVQFLKKAVDVLCQCRATLMYTYVFAFYLKKNNQSIIFENNQADLENATEVLSGYLERDISQDSLQDIKQKVQDKYRYCESRRRVLLQHVHEGYEKDLWEYIED

SEQ ID NO: 120 - DNA, 2278 bp, Homo sapiens
  source 1..2278: mol_type = other DNA
acttccggagctgtggggacgactcttctggaggaagcagcgcgggcttgaccggcgtcggcccgccgcctccgctgccgcttcgccccaatccggtccctctggcccggcctgacccggtctggcttgttcgggctcagcggccgcgaggccgcagctcccgatggaaatcatattatgtagaatacttgggtgacatctgcctgagagatctccaagaattacagattgagtctcgctctgttgcccaggctggagtgcagtggtgcaatctctgctcactgcaacctccgtctcccgagttcaagcagttctcctgcctcagcctcctgagtagctgggattacagaagacaaaaatactaatgcatttgagaaagcggtagttttggggggagggggaaaaagcaactgctttcctgatctgcaacttggctggatgctaagatgtcagtggacatgaatagccaggggtctgacagcaatgaagaggactatgacccaaattgtgaggaagaggaagaagaagaagaagacgaccctggggacatagaggactattacgtgggagtagccagcgatgtggagcagcagggggctgatgcctttgatcccgaggagtaccagttcacttgcttgacctacaaggaatctgagggtgccctcaatgagcacatgaccagcttagcttctgtcctaaaggtatctcattcagttgctaaacttatattagttaatttccactggcaagtttcagagatattggacagatacaagtccaattctgctcaactgcttgttgaggctcgagttcagcctaatccatcaaaacatgttcccacatcccatccccctcaccactgtgcagtgtgtatgcagtttgtgcgaaaggaaaacctactctctctggcctgtcagcaccagttttgccgcagctgctgggagcagcactgctcagttctcgtcaaggacggcgtgggcgtgggagtctcttgcatggctcaggactgtccactccgtacaccagaggactttgtgtttccattgcttcccaatgaagaattgagagagaaatacaggcgctacctcttcagggactatgtggagagtcattaccagctccagctgtgccctggtgcagactgccccatggttattcgggtacaggagcctagagctcgccgagtacagtgcaatcggtgcaacgaggtcttctgtttcaagtgtcgtcagatgtatcacgcacccacagactgtgccacaatccggaaatggctcacgaagtgtgcagacgactctgaaacagccaactacattagtgctcacactaaagactgtcccaagtgcaacatctgcattgagaagaatggaggctgcaatcacatgcaatgctccaaatgtaaacacgacttctgctggatgtgtctaggagattggaagactcatggcagtgaatactatgagtgcagtcgttacaaggagaatcctgacatcgtgaaccagagccaacaagcccaggcgagggaagccctcaagaagtacttattctactttgagaggtgggaaaaccacaataaaagcttgcagctagaggcacagacataccagcggattcacgagaagattcaggagagggtcatgaacaatctggggacatggatcgactggcagtacctacagaatgctgccaagctcttggccaagtgtcgatacaccctgcaatacacctacccatatgcatattacatggagtccggacccaggaagaagctgtttgaataccagcaggctcagctggaggctgagatcgaaaacctctcatggaaagtggagcgtgcagacagctatgacagaggggacttggagaaccagatgcatatagcggagcagcggaggagaaccctgctgaaagatttccatgacacctaagttgggatgtggatgtgccggggtgaggaagatgtggctgcaaggtctcccggctgccatactgcatgctgcaggctctgcctttcatgaccccaggcaacagccagggccccactcctgagagacactggcaacacctcttagttgatttctgttttcttctcttttcactttttgtttctaccagggtagaggccatgttgaactggcctcttttcaggacttttatttccccctggatggttgttgggagggagggaaagtgttttctgaatggctattaatagtattagatcattacaacttatgtaactttcaaaggttgtacaattatacaaaaaaaaaaaaaa

SEQ ID NO: 121 - protein, 493 aa, Homo sapiens
MSVDMNSQGSDSNEEDYDPNCEEEEEEEEDDPGDIEDYYVGVASDVEQQGADAFDPEEYQFTCLTYKESEGALNEHMTSLASVLKVSHSVAKLILVNFHWQVSEILDRYKSNSAQLLVEARVQPNPSKHVPTSHPPHHCAVCMQFVRKENLLSLACQHQFCRSCWEQHCSVLVKDGVGVGVSCMAQDCPLRTPEDFVFPLLPNEELREKYRRYLFRDYVESHYQLQLCPGADCPMVIRVQEPRARRVQCNRCNEVFCFKCRQMYHAPTDCATIRKWLTKCADDSETANYISAHTKDCPKCNICIEKNGGCNHMQCSKCKHDFCWMCLGDWKTHGSEYYECSRYKENPDIVNQSQQAQAREALKKYLFYFERWENHNKSLQLEAQTYQRIHEKIQERVMNNLGTWIDWQYLQNAAKLLAKCRYTLQYTYPYAYYMESGPRKKLFEYQQAQLEAEIENLSWKVERADSYDRGDLENQMHIAEQRRRTLLKDFHDT

SEQ ID NO: 122 - DNA, 8774 bp, Homo sapiens
  source 1..8774: mol_type = other DNA
gcgcgcgaaaagctgaggcggcaacgtcggggacggctgcgcgggacggctctgtaggaaggaacttggttccccctccctcagcttccgccccaaaagattcagaatggacagtttagaagaacctcagaaaaaagtctttaaggctcgaaaaacgatgagagtgagtgatcgtcagcaacttgaagcagtgtacaaggtcaaagaagaactgttgaaaactgatgtcaagctgttaaatggcaaccatgaaaatggagatttggacccaacctcacctttggaaaacatggattacattaaagacaaggaagaggtgaatggcattgaagagatttgttttgatcctgaaggaagtaaagcagaatggaaggaaacaccctgtatcctaagtgttaatgtaaaaaacaagcaggatgatgatttaaattgtgaacctttgtctccccataatataactccagaaccagtctctaaactgcctgctgaaccagtttctggtgatccagcccctggtgatctggatgccggagatccagcctccggagtactggcctctggtgattccacctctggtgatcccacctctagcgagccctcctctagtgatgctgcctctggtgatgcaacctctggtgatgccccttctggtgatgtgtcccctggtgatgccacctctggtgatgccactgctgatgatctctcctctggtgatcccacctctagtgatcccatcccaggtgaaccggtccctgttgaacccatttctggtgattgtgccgctgatgatatagcctctagtgaaataacttctgttgatctggcttctggagcaccagcttccactgatccagcctctgatgatctggcctctggtgatctatcctctagtgaactggcctctgatgatctggccactggtgaactggcctctgatgagctgacttctgaatcaacctttgatcgtacctttgaaccaaagtctgtaccagtttgtgaaccagttcctgaaattgacaatatagaaccaagtagcaataaagatgatgattttcttgaaaaaaatggagctgatgaaaaattagagcaaattcagagtaaagactcattggatgagaaaaataaagctgataataatattgatgctaatgaagaaactctagaaacagatgatacaactatttgttcagatcgacctcctgaaaatgaaaagaaggtagaggaagatattatcacagagcttgctcttggagaagatgctatatctagcagtatggaaattgaccaaggtgaaaagaatgaagatgaaacttctgcagatcttgtagaaacgattaatgaaaatgttattgaagataacaaaagtgagaatatcttagaaaatacagactctatggagacagatgaaatcattcctattttggaaaagcttgcaccttctgaggatgaacttacttgcttttctaaaacatctctccttccaatcgatgagacaaatccagatttggaagagaaaatggaaagttcttttggttcaccatctaaacaagaaagtagtgagagtttgccaaaagaagcctttctggtcctctctgatgaagaggatatttcgggtgaaaaagatgagtctgaagttatatcgcaaaatgaaacgtgctctccagaagtagaaagtaatgaaaaggacaacaaacctgaggaagaagagcaagtaatacatgaagatgatgaaagaccttctgagaaaaatgaattttctagacgaaaacgttctaaatcagaagacatggacaatgtacagtctaaacgtcgtcgatatatggaagaagaatatgaggcagaatttcaagtaaagattacagccaaaggagacattaaccagaaacttcaaaaggttatacagtggttgctggaagaaaaattgtgtgcgctgcagtgtgctgtatttgataagactttggcagaattgaaaacacgagtggaaaagattgaatgtaacaagaggcataaaacagttctcactgaactacaggccaagatagccaggttaaccaaacgctttgaagcagccaaagaagatcttaagaaaagacatgaacatccacccaacccaccagtatcaccaggaaaaactgtaaatgatgtcaacagcaataataacatgtcttacagaaatgcaggcacagtgagacagatgctggagtccaaaagaaatgtaagcgagagtgcaccaccatcctttcaaactcctgtgaatacagtatcttcaaccaatcttgtcactcctccagcagttgtcagtagtcaacctaaattgcagactccagtgacttcgggttccctcacagcaacgtcagttcttcctgcacccaatacagctactgtagttgctactactcaggtgcctagtggaaatccccagcctacaatctctttacagcctttgccagtgattttgcatgtacctgttgcagtatcctcccagcctcagcttctacagagccatccagggactttggtgactaatcaaccatctggcaatgttgaattcatttctgtgcaaagcccacctacagtgagtggtcttaccaaaaatccagtatccttgccatccttgccaaatcccactaaaccaaacaacgttccttctgtgcccagtcctagtattcaaaggaaccctactgccagtgctgcaccattgggaacaacacttgctgtgcaggctgttccaacagcacactctattgtacaagccacaaggacttctttacccacagtgggcccatcaggactctatagtccatcaactaatcgaggtcctatacagatgaaaattccaatttctgcatttagtacttcgtctgctgcagaacagaacagcaataccaccccaagaattgaaaaccagacaaacaaaacaatagatgcttctgtcagtaagaaagcagctgatagcacatcacagtgtggaaaagccactggcagtgattcaagtggtgtcattgatctcacaatggatgatgaagagagtggagcttcacaagaccccaaaaaactaaatcacactcctgtatcaaccatgagttcttctcagcctgtgtcacgaccattgcaacccatacaaccagcaccgcctcttcaaccatctggggtgccaacaagtggaccatctcagaccaccatacacttactacctacagctccaactaccgtgaatgtaacacatcgtccagtaactcaggtgaccacaagactccctgtaccaagagctcctgcaaaccaccaggtggtttatacaactcttcctgcaccaccagctcaggctcccttgcgaggaactgttatgcaggctcctgctgttcggcaggtcaatccccaaaatagtgttacagttcgagtgcctcaaacaaccacatatgttgtaaacaatggactaaccctgggatcaacaggacctcagctcacagtgcatcaccgaccaccacaagtgcatactgagcccccacgccccgtgcacccagcacccttaccagaagctccacaaccacagcgtctgcccccagaagctgccagcacatctctgcctcagaagccacacttgaagttagcacgcgttcagagtcaaaatggcatagtactgtcatggagtgtcctggaggtggatcgaagctgtgccactgttgatagctaccatctctatgcttaccatgaggaacccagtgccactgtgccctcacaatggaaaaagattggggaagtcaaggcacttcccttgcccatggcatgtactctcacccagtttgtatctggtagcaaatactactttgcagtacgagccaaggatatttatggacgttttgggcctttctgtgatcctcagtcaacagatgtgatctcttctacccagagcagttaaaccttggagcctttatattttcctcttttaaaatttccaccttttggtcttgtttttaatcttgtgcatgataccccatgtaaaatccaccttgtgcaagatttcttggacagatgtgtgtatacactacatttgtttataaccagaagcaaaataaactcagcccacaaagctagaatcttttcctggacagtttaggctttggggtttggaaatgtaaatgtgtaccttgctttagttttgaggctggggaatatgtgtgggtgtttatgtgtgtttttccttatgtaggtgttattgcattggagtctcccattttcattctcaaatttacctcttaaagtacgaagtaagtagatcaaaggatttgagatgtgtaactggcatgattctgcttttgaaggatctatagtatcattttagttaagtgggtcaaacagaatcaaaacaaaacccaaagaaataaataaaaaacaaaatggctaaatagtttaaaataggttaattcgaacacaggaaaggatctatttgttgtttcttttgtctggtctcctgagttgttaattaggtgaaaaaagatctgcaatggccccctccctttcctaatctggcttttacatttattttgtgccttaaagattaactacaaagataaacatggccaaaaataaataaataaatatggccatatgtccgttgttgcttagtcttcccttgcagccttttacccttgatttctccttcatctctaccaaatatagcacaactcctcaagtaattttttttttttaagatggagttttgctcttgttgcccaggctagagtgcggtggcacaatcttggctcactgcaacctctgcctcctgggttcaagcaattcttctgtctcagccccagagtagctgggattacaggcacctgtcaccatgcccggctaatttttgtatttttagtagagatggggtttcaccatgttggccaggctggtcttgaactcctgacctcaggtgatccacccgcctcggcctcccagagtgctgcgattacagttgtgagccactgtatccagcctactcaagtgatttttaaaccaaggtgtgtgtatgtacatggatgtgtatgtacacacacacacaggtgcatgcatagtctcatcttagccgggcatggtggcgacaatcacatttaactccaaaaatttgacgtgctattttcttctaaaactatagatgcttttatttttggtcactatttaactttgtgtaaagtggaccaagagaaaaccatattgtggaagacagtttttcacacattttagtatccgtgttgcacactgtgttagagattatgaaaaccattctagttcagtttatcacccaaagctatcacccaacactaactccttagtattctttcaaaggaagcaaatagtaagattacaatatagaatgagctaaaatatcaaggggaaagcttcatttcctctttattctctttatcgtccttcccattttaaccttttaactttgttttgatggtgccaagttgagtctgatgtacccattgttagctttggatagaatttaaagtatatcccagaattagctgggcatgttggtgcatgcctgtaatcccagctactcaggaggcaaggctggagaatcgcttgaacccgggaggcggaggttgcagtgagctgagattgcgccattgcactccatcctgggagacaagagcgaaactctgcctcaaaaaaaaaagaatttaaagtatatcctttgaggtcattttatgtaacaattagatataacctcctgtgtatctctctgttcctcttcaaagttattaaaattcagcttaggtcatggatttttaatatgagggccagctgtactggtgtcaggtaggtgttttgggtgtagataatttaggactggagggctgagttaagttttaggaggagaatgtggttgagaatattttgaaaggaatttatggagtttgtgaaataacttcgaagtcctcttcctttacaatatttgaattcatatttgtaccttctcaaaatagtgattcatttttcctagaattacaggagggagctcttttactaatgttgttttgtttgcaactttgatggcttataataggaagtattctagttgtaaagaaaactctttagagacttttgactggtcagtatactgaggtgtgagatttgattcatgatgaagaaagcctatagattgccaaaaaattaattctccaaaccacctttcactctcagaaaatgagaccacaaaggagtatgctataaatcaaatttgccaaccaattatgtagatattactcattctaggactaatgatgatggtaaagaagttgccagtgttatggcaatgaaaatttcagaaaggaggagttgatgatcttctagatgtatatgaacacctgtctatatctgcatgtatatgttttgacctgcagtggttgcaatgttgatatgtgttcaagattattcctgtctacaaaactgaaggcccatgttcaaattgttctttattgggtgtttttatggtcacgtggtaacaattttcttacctaacctacaaaaggttctcttgatgaacatttttatttatatttactaatcttttttaaaaaaagctttcatagcattatataatcagatgaagaaagcccagtagaataaaaaaaaaattcattagcctagcctatattatgttttctgtcaaaggaaaacaaattctcaaataggaattctaaaaatatttactaaagtaaaataactacttaaaatgttttattccagttggaaggaaggtacagggagaaatcgcaattatttaggggagaagtatatttattataagatggtgtcctcaaattagcctaccatggcacgtaggggcagcagctatattagatttactagaggtgctaagttagaacactaggcttttattgaggcaggttttaatattgatagatgctttttgtttggtttgtttcttctgggagagaatggaggacttaagtagaagtagctactgataacagactttctagtagcagtttccactccacggttacctttttagtttcatagtatcttttcacaaagtattacaaataagctagattctcccagtttgggaatgcaagtttgctacatttttagcctggcaatatttgtgtaggtattgccttattggaaattctggaaacctgatactgcaacctgcaatgtaggatgtttgtatggcatttaaaggtaatggtgatgtttattattctatactttgcattctgtgagagtaattttcactctgtcttaagtgtgagtaagcctcttctaaaaatcttgttcttgccaagaaatttataaatcacatacgaagacgtctgttgctaacagttaactttatgaggtaactatatccttctatttctctggactcatttttaaaaaatatgccgaatactgcatactgtttaaggtagtatataagtttatgagagaagtggagagctttcttccttgaaaagtcggtatttgttgagataccatttgcctcacagagaggtgttccccactcccatccccattgccagataataaatattttgagaaaagtgacctaaaacagctgaaatcttaggtgcatctgtctgcagacctccttaagcaggctgtatcttacaattcccttactgcactgggtaagtgttaacttagtttttgttgtttgctcttttgctttaaatattctccaaattaccatttatgcaacatggttagggttaatactgcatggtattcatttatcttgtttcatgaactttccagtactgtacaaggtcaacaaagtaatgcctgtggtatcctcatctctcacttttttactctgtgattttagcacagtaaggtactgcaaagaccttccttccaaatgttctccttgactttatttcttgggccaattcagtatcctcaacatcctaagattttgttgttttatcactgacctgtggttggcctgttttattctaatttccagaaaagtcaagtcccagtatttgcaatatcaaataactctaaaaccgatgtgtgattctaccttccttactatttttactgggcaaatgccctatttttttaattattattatttttaacttttgggacacacaaaaatcagcaattctcatgaagcgtttgttagtgtggcagacttgtctaattcctgaaactcattcatccccttgagccagccaatggggaggaataggataatgcaaacacatgttttgttttctcattttcaaataatttaccatgttaaaataaacttttctttgttttttatttgtagagtcagctaagtacccatatttaaatgccgtctttattatttttttgaggtctttgtttttgtctgtttttgttttgttttgttttgtaaataaggtaactgggcaatcaaacaccttttggggattctggctttagtattttatcagccattttaaaattaaatataaaaatcctttgtaagaaacttgcatcctaatttttctttattgcaattgaaagtgtaaataataagacaatgtaagtaagaccttcctaatgtctaatacaaactgggctccagcaagtggccctatttttattagggttttgaaggtttgtgtgtgtgtgtgcgtgcgtgtgtgtgtttttcttttttaaatgtatagtagagtggtgtctgtataagtgttacctgtagtggggttttgtccagcaagcctgaaatttatactttgaaataaaactactgggtttttaac

SEQ ID NO: 123 - protein, 1269 aa, Homo sapiens
MDSLEEPQKKVFKARKTMRVSDRQQLEAVYKVKEELLKTDVKLLNGNHENGDLDPTSPLENMDYIKDKEEVNGIEEICFDPEGSKAEWKETPCILSVNVKNKQDDDLNCEPLSPHNITPEPVSKLPAEPVSGDPAPGDLDAGDPASGVLASGDSTSGDPTSSEPSSSDAASGDATSGDAPSGDVSPGDATSGDATADDLSSGDPTSSDPIPGEPVPVEPISGDCAADDIASSEITSVDLASGAPASTDPASDDLASGDLSSSELASDDLATGELASDELTSESTFDRTFEPKSVPVCEPVPEIDNIEPSSNKDDDFLEKNGADEKLEQIQSKDSLDEKNKADNNIDANEETLETDDTTICSDRPPENEKKVEEDIITELALGEDAISSSMEIDQGEKNEDETSADLVETINENVIEDNKSENILENTDSMETDEIIPILEKLAPSEDELTCFSKTSLLPIDETNPDLEEKMESSFGSPSKQESSESLPKEAFLVLSDEEDISGEKDESEVISQNETCSPEVESNEKDNKPEEEEQVIHEDDERPSEKNEFSRRKRSKSEDMDNVQSKRRRYMEEEYEAEFQVKITAKGDINQKLQKVIQWLLEEKLCALQCAVFDKTLAELKTRVEKIECNKRHKTVLTELQAKIARLTKRFEAAKEDLKKRHEHPPNPPVSPGKTVNDVNSNNNMSYRNAGTVRQMLESKRNVSESAPPSFQTPVNTVSSTNLVTPPAVVSSQPKLQTPVTSGSLTATSVLPAPNTATVVATTQVPSGNPQPTISLQPLPVILHVPVAVSSQPQLLQSHPGTLVTNQPSGNVEFISVQSPPTVSGLTKNPVSLPSLPNPTKPNNVPSVPSPSIQRNPTASAAPLGTTLAVQAVPTAHSIVQATRTSLPTVGPSGLYSPSTNRGPIQMKIPISAFSTSSAAEQNSNTTPRIENQTNKTIDASVSKKAADSTSQCGKATGSDSSGVIDLTMDDEESGASQDPKKLNHTPVSTMSSSQPVSRPLQPIQPAPPLQPSGVPTSGPSQTTIHLLPTAPTTVNVTHRPVTQVTTRLPVPRAPANHQVVYTTLPAPPAQAPLRGTVMQAPAVRQVNPQNSVTVRVPQTTTYVVNNGLTLGSTGPQLTVHHRPPQVHTEPPRPVHPAPLPEAPQPQRLPPEAASTSLPQKPHLKLARVQSQNGIVLSWSVLEVDRSCATVDSYHLYAYHEEPSATVPSQWKKIGEVKALPLPMACTLTQFVSGSKYYFAVRAKDIYGRFGPFCDPQSTDVISSTQSS

SEQ ID NO: 124 - DNA, 3641 bp, Homo sapiens
  source 1..3641: mol_type = other DNA
agcattgttaacggctgcggttcgaagtggctgtgggtattgctgcggctggtgcgtcgtcgctctaggttttcttccgccgtctgtgacagcttcttgatctgtccccaggaatcctgctttttttttttctttgagacacggtctcactctgtcacccttgctggagtgcagtggtgcaatcacagatcacggcagtgtctaattcctgggctcaagtgaaccttttgcatcagcctcctgaatagctgagaccacaggatatgaaagatggcaagtccagatagaagtaaacggaagatattaaaagccaaaaagacaatgcccctaagttgccggaagcaagtagagatgctgaataagtcaaggaatgttgaagcgctgaaaacagcaattgggagtaatgttccaagcggtaatcagagtttcagtcctagtgtcataactaggacgactgaaataaccaaatgtagcccttctgaaaatggtgcatcctcattggactctaataaaaattcaatatcagagaaaagtaaagtattctctcagaattgcataaaaccagtagaagaaattgttcattcagaaacaaaattggaacaagttgtttgttcgtaccaaaagccaagtagaacaacagaatcccccagcagagtcttcacagaagaggcaaaagattcactgaacacttctgaaaacgattctgagcatcagacaaatgtaacaagatccctttttgagcatgagggggcttgtagtctaaagtccagttgctgtccacccagtgtattgagtggtgttgttcagatgccagagtctacagtaaccagtaccgtgggtgacaagaaaactgaccagatggttttccatttagaaacaaactccaattcagaatcacatgataaaaggcaaagtgacaacattttatgttcagaagactcaggttttgtgcctgttgagaaaacacctaatttggtgaattcagtcacttctaacaactgtgctgatgacattttgaaaactgatgagtgtagtagaaccagtatttcaaattgtgaaagtgcagactcaacatggcagtcatcacttgacactaataacaacagccattatcaaaagaagaggatgttttcagaaaacgaggaaaatgttaaacgcatgaaaacttcagagcaaattaatgaaaatatttgtgtaagtttggaaaggcaaacagcattcctggaacaggtcagacatttgattcagcaggagatctatagcataaattatgaactatttgataagaaactgaaagaattgaaccaacgcattgggaagacagagtgcagaaataagcatgaaggaatagctgataaacttttggcaaaaatagcaaaacttcaaagacgtattaaaacagtattattatttcaaaggaattgtttgaaaccaaacatgttatccagtaatggagcctctaaggttgcaaattcagaggctatgattttggataagaatcttgagtcagttaatagtccaattgaaaagtcttctgtgaattatgagccttctaacccttccgaaaaaggaagtaaaaaaattaatttgtcatcagatcaaaataagtctgtttctgaaagtaacaatgatgatgttatgttgatttctgtggaaagtcctaatttgacaactccaattacatcaaatccaacagataccagaaaaattacatcaggaaattctagcaattctcccaatgctgaagttatgaaagtccagtatcccccctggagtcacattcgaaagctgcttcaaactcaaaggaaacaaccccattggcacaaaatgcagtccaggttcctgagtcctttgagcacctgccacctctcccagaaccaccagcaccactacctgaattagtagacaaaacccgagacacacttcctccccagaagcctgagctcaaagtgaaacgggttttcagacccaatggcattgccctgacttggaatataaccaaaatcaatcccaagtgtgctcctgtagaaagctaccacctcttcctgtgtcatgagaactctaataataagttgatttggaagaagattggagaaattaaagctttaccactccccatggcctgtactttatctcagtttttagcttccaacagatactattttactgtccaatcaaaagatatttttggacgatatggaccattctgtgatataaaatctatccctgggttttctgaaaatcttacgtaaaaggtgtttaataatgatatactactttttttttcatatttgtttgtttgcaatgttactgtaatactatttgccattgtaaaaggccagctcagattgtgagccctttctattgggacagtcctcttctatatgttttaagtggccagtaatttaatgaatttctggtttgtattaaatatgtccttccaatggataagttctaaaacatacgctatcattggcccatgttgctgaggtgcattgtgaacaatacctttagtgactgtggaactgctgcttctatcagaagacctaggatacaagcagccactgtttcctccgttaacaatcagcttttagtaacctgctgtggtcagcatagctacaggaaaagtcagcccttgactgagggccagatcatccctggagtgcacctctactaagattttatgaaaagatgacatgttgggctgcatgataaaagttaattataaaaattaaaagatttttttttttgagatggaatattgctctgttgcccaggctggagtacagtggtcactgcaacctccatctccctggttcaagcaattctcctatgtcagcctcccaagtagctgggactatagtcacttgccaccatgcccggctaatttatttttagtagagatgaggtttcaccttgttggtcaggctggtctcaaactcctgacctcaggggatccacccgcctcggcctcccgaagtgctgggattataggcgtaagccaccatgcctggccaaaaattaaaagattttatgaaacgaaatggcttcccattctttctattcagcttctaagtgggctattcatttgtgctctcctcttttttgttttgttttgcactttgtcaatcatttggggaaatagcctggaggtctttcctgaatctgtttgtagacataataaaatttgtgtgctgtgtacacaaaaacataatgtatcttatgaaagcattacccaacctgtttgagttgagaatgcatttgtccacctttgatttgaggctttagtttgctgatttcctaaatgctaccctttgatcatttcctggccaccatcacaatactaaggggctcagatgtgtcttgtgcccacctcttcctgagaagagatggaagtggagctgtgactagtacaagcagcccaagaaactctgaacggggcccaatggaggcaaacttgagcaaataattgggatgataagaaacaaaaataatcccaactgtttgaaagttcgaaagaggggcattcttttctggtacatggtgagagttcaggctccagagactcaaaacggaatggttttccttggcattttgtaaatgctctcacatctgtagcaataaagctgttattttctgca

SEQ ID NO: 125 - protein, 543 aa, Homo sapiens
MASPDRSKRKILKAKKTMPLSCRKQVEMLNKSRNVEALKTAIGSNVPSGNQSFSPSVITRTTEITKCSPSENGASSLDSNKNSISEKSKVFSQNCIKPVEEIVHSETKLEQVVCSYQKPSRTTESPSRVFTEEAKDSLNTSENDSEHQTNVTRSLFEHEGACSLKSSCCPPSVLSGVVQMPESTVTSTVGDKKTDQMVFHLETNSNSESHDKRQSDNILCSEDSGFVPVEKTPNLVNSVTSNNCADDILKTDECSRTSISNCESADSTWQSSLDTNNNSHYQKKRMFSENEENVKRMKTSEQINENICVSLERQTAFLEQVRHLIQQEIYSINYELFDKKLKELNQRIGKTECRNKHEGIADKLLAKIAKLQRRIKTVLLFQRNCLKPNMLSSNGASKVANSEAMILDKNLESVNSPIEKSSVNYEPSNPSEKGSKKINLSSDQNKSVSESNNDDVMLISVESPNLTTPITSNPTDTRKITSGNSSNSPNAEVMKVQYPPWSHIRKLLQTQRKQPHWHKMQSRFLSPLSTCHLSQNHQHHYLN

SEQ ID NO: 126 - DNA, 3523 bp, Homo sapiens
  source 1..3523: mol_type = other DNA
atgaaaatggaggaaatgtctttgtctggcctggataacagcaaactagaggccatcgctcaggagatatacgcggacctggtcgaggattcttgtttgggattctgctttgaggtacaccgggctgtcaagtgtggctacttcttcttggacgacacggaccctgatagcatgaaggattttgagatcgtggaccagccgggcttggacatctttggacaggttttcaaccagtggaagagcaaggagtgtgtttgccccaattgcagtcgcagcattgccgcctcccgctttgctccccatctggagaagtgcctgggaatgggtcggaacagcagccgaatcgccaaccgccggattgccaatagcaacaatatgaataagtctgagagtgaccaagaagataatgatgacatcaatgacaacgactggtcctatggctcggagaagaaagccaagaagagaaagtcagacaagctatggtatctcccattccagaaccccaattcccctcgaagatccaagtcattaaaacacaaaaatggggaacttagcaattcggatccttttaagtataacaattcaactgggatcagctatgagaccctggggccggaggagcttcgcagcctgctaaccacgcaatgtggggtgatttctgaacacaccaagaagatgtgcacaaggtccctgcgctgcccacagcacacagatgagcagaggcgaaccgtacggatttattttctcgggccctcggctgtccttccagaggtcgagagctccctggataatgacagctttgacatgactgacagccaggccctgatcagccggcttcagtgggacggctcctctgacctctcaccctctgattcaggctcctccaagacgagtgaaaatcagggatggggtctaggtaccaacagctctgagtcacggaaaaccaagaaaaagaaatcccatctgagcctggtagggactgcctccggcctaggttccaacaagaagaagaagccaaagccaccggcacccccgacgcccagcatctatgatgacatcaactgacttgggtgcaagggatagcctttggctgagcagagccctctctcctgacccccacccaggtggcatagcctggcaaatggacggctgctgggggttggggcttgggaagcttggtgggccaggcaggcagaggatccgattatgcgcccctggggggtgtcaaagtcctctgcaatggagcacgactcctcggcgtgcaggactcagacctggacatattatgccttggacataagtttggtggggaggcggttttcctatttattctgtgagttactggatgtccagctaggccaggggcctgacctgggcactgtgccagggcactgcctgccccccaccccaggaactggactaagccctgctgaggggcaatgtggcgacccgggaggctgtgggttggaagctgagcctggagggggcctgcctcggccgccctcagcaatgtgaatgggtccggtgcttggagctgaggggcaaggctgggcatgtcctgtctgtgtgcagaatcttatcaaatgcccccagtcccaggggtaggcaggcacagagtgctgtctgctgaggtgggcgtccagaactgccgccaccttccctgcccctcacaggggcagccctttcccctcagtccccatgggcctccttggcagcaggagctgtccttttgttgggtgccaggaaagggcctccagcctctacagcttcaaggaatgggaaagggagggtaggaagagggagaagtgtcagaattcctccccctgcctctcctccctgacccagggctggtgaggagtggggccccaaggtgagagggaacggtgctgctttatttgaaatgttttcttacctcattccctgccccaggaagggacccagcctcaccctcctggggtggccccgtgttcctcctgcccaccctgccccactgccctaccggggcagcccaggttcccaactgctgcttccacccccttcaccttgactggcttcagttcctctcagcgctcctgcctccaaagcgtgccctgtttcccttccttagcgcttttaagttatttattctgtacttgtggtttggggctctgaggaaaatcctaatcttgtgcctctccccctttgctaggagttgggtgggaagagagggtggcctctgtgccccaggttgtcagtggaggggaaggggtgtcactgcccctctgtgggactgtcatgccagtgtgcccacctgcctggtctacatcctaaagagatgtaccgtcccccctccatgcgggcaccaccactcccaggagccaagctggaggaccgcgacctgggctgggagcagagctgactgacatgggtggaggtgaccctgagccaagttctctggcacttgctggacatgtcccctaccctcttcccaagaggagccatcccacatttgggtagttagtacccaggactggttggactgatcgggttagggaccctagagggttaagggaacaacagagatggggctgcaatgccctgtctggaactccgctctcccgctggggtggttctgattgtggctcatgcctggttgcaaattggtttttaacccacaaattgtgattattttttaaaaagccaaacagattttggcaggagttagaataaatcccggggcctgggcttctctattcttggccctccgtagtctccctccgagaggaggccagagggagaggaggatctcagcaggcctctagccgcttccagatgcagtctggggagtgggctgaaggtgaagggaggaaggctgtgggccactctcccttctgagaggcagctgcagctcaggccctaatacactctttgccctgtggcctctcccttttccccccttctggttggaggagggagaagtgggaagtagcttgggaactggtttgtccacataaacttccccattgttccttggcccgccctcagggcagagccccctgcccaggctgggtaagagatgggcttggtccagcagggaccctgagggaacaaacccttttccttctggggagagagtgccccccctaccatgtagttgaacaggggctaggagctccccactcccctccctctaacagcaggctgtgtgggtttcaattcccatccttcccaccccggctaggtgtcgtccaccctgtatcctgtgtctgagtgtgtgtgggggggttctgtactaatttccatggccggtggcttttccttccatgcatcactcccccccgcatgcccaggggccacccgcctggcattaccgcatgctggggtcattgggggaggggggtggggctcacgctgtcctgtggtcttgagatttttatttttgcatatgtaatccattctgtacaggtagctaactttgtaaacgctgtgtattccctctgcccccatggctgctggtgtaaataaactgcatctcccgttggta

SEQ ID NO: 127 - protein, 354 aa, Homo sapiens
MKMEEMSLSGLDNSKLEAIAQEIYADLVEDSCLGFCFEVHRAVKCGYFFLDDTDPDSMKDFEIVDQPGLDIFGQVFNQWKSKECVCPNCSRSIAASRFAPHLEKCLGMGRNSSRIANRRIANSNNMNKSESDQEDNDDINDNDWSYGSEKKAKKRKSDKLWYLPFQNPNSPRRSKSLKHKNGELSNSDPFKYNNSTGISYETLGPEELRSLLTTQCGVISEHTKKMCTRSLRCPQHTDEQRRTVRIYFLGPSAVLPEVESSLDNDSFDMTDSQALISRLQWDGSSDLSPSDSGSSKTSENQGWGLGTNSSESRKTKKKKSHLSLVGTASGLGSNKKKKPKPPAPPTPSIYDDIN

SEQ ID NO: 128 - DNA, 1489 bp, Homo sapiens
  source 1..1489: mol_type = other DNA
acgcggggcgtctggaacttaaaggggcagcgtaccttggccgtcccgttccacaacaaggtcccttctgcggtctcaaaggcttataagcaagggcgggggcagagggctaaagaagggagtttttgcggcccgagtgggtaatgcgtggaggactcccccaactcgtctctcaaggaaaagggggttcagaaagggagagagttcttccccctctcctgcctgggtgtcgctccaccagcctcctggccgtcgcgccccctcctcactgcgccacccccgggtgtgcctccttccctgcgtctcacacagcccctttcttgtccgcaaagactgaggagcggggagggcgggccctctgacaccggaacaggagccgtgcggcgtccggtttcagcagggaaggcttaggcgggcgtcccaacctccgggcttccggtgccgtttcccggttcgctcggccgcggtcgctatggaggagccggagatgcagctcaaggggaagaaagtcacggacaagttcactgagagcgtctacgtcctggccaacgagccatccgtggccctgtaccggctgcaggagcatgtgcgtcgctccctccccgagctggcccagcacaaggcagacatgcagcgttgggaggagcagagccagggagccatctacactgtggagtacgcctgcagcgccgtgaagaacctggtggacagcagcgtctacttccgcagcgtggagggtctgctcaaacaggccatcagcatccgggaccatatgaatgccagtgcccagggccacaggtagctcctgggaccgcccgcccccactgccactcccagctgcaaggaccgtctctcagctgcgctgggaaccgctgcttctcgcttattagaaaactgtctctttccttttgtcctggtgtctggtgacctcctcttgtcctgtggcatctataacctgagttcagtcacttaataccgaggtcctgcgctctgctgtgtgcctggccctgggctgggcactggggacatagcagtgaccgagacagacaggctcacaaggagacatacgacaaccaggtaaacatggcagacaagagcatgtcagatgcgctgtgaagaacactgcggggcccctcctaggaggtggcatgagttacatgcagacagagacgatccgggggcagacggagttccatgtggggcagtggtgagggcagacgctctggggctgggatccctgggagtgttcgagaagcaccgagaaggcttctgtggctggagccggccagctgggggagatggggccagggagatggcaggggcctctccctgtcccaggacccagagccaagggaggctttaagcccaggaccaggggtctgaaaacgaaaagcactcacagtccttgaacattggaaagagaatttttgaagagtagcccttctttttgtttttgttggcattctaagttaataaacacgcttatgaa

SEQ ID NO: 129 - protein, 109 aa, Homo sapiens
MEEPEMQLKGKKVTDKFTESVYVLANEPSVALYRLQEHVRRSLPELAQHKADMQRWEEQSQGAIYTVEYACSAVKNLVDSSVYFRSVEGLLKQAISIRDHMNASAQGHR

SEQ ID NO: 130 - DNA, 11176 bp, Homo sapiens
  source 1..11176: mol_type = other DNA
cttttgccctagggagcgagtgcggagcgagtgggagcgagacggccctgagtggaagtgtctggctccccgtagaggcccttctgtacgccccgccgcccatgagctcgttctcacgcgaacagcgccgtcgttaggctggctctgtagcctcggcttaccccgggacaggcccacgcctcgccagggagggggcagcccgtcgaggcgcctccctagtcagcgtcggcgtcgcgctgcgaccctggaagcgggagccgccgcgagcgagaggaggagctccagtggcggcggcggcggcggcagcggcagcgggcagcagctccagcagcgccagcaggcgggatcgaggccgtcaacatggcgagcgcctcgtaccacatttccaatttgctggaaaaaatgacatccagcgacaaggactttaggtttatggctacaaatgatttgatgacggaactgcagaaagattccatcaagttggatgatgatagtgaaaggaaagtagtgaaaatgattttgaagttattggaagataaaaatggagaggtacagaatttagctgtcaaatgtcttggtcctttagtgagtaaagtgaaagaataccaagtagagacaattgtagataccctctgcactaacatgctttctgataaagaacaacttcgagacatttcaagtattggtcttaaaacagtaattggagaacttcctccagcttccagtggctctgcattagctgctaatgtatgtaaaaagattactggacgtcttacaagtgcaatagcaaaacaggaagatgtctctgttcagctagaagccttggatattatggctgatatgttgagcaggcaaggaggacttcttgttaatttccatccttcaattctgacctgtctacttccccagttgaccagccctagacttgcagtgaggaaaagaaccattatcgctcttggccatctggttatgagctgtggaaatatagtttttgtagatcttattgaacatctgttgtcagagttgtccaaaaatgattctatgtcaacaacaagaacctacatacaatgtattgctgctattagtaggcaagctggtcatagaataggtgaataccttgagaagataattcctttggtggtaaaattttgcaatgtagatgatgatgaattaagagagtactgtattcaagcctttgaatcatttgtaagaagatgtcctaaggaagtatatcctcatgtttctaccattataaatatttgtcttaaatatcttacctatgatccaaattataattacgatgatgaagatgaagatgaaaatgcaatggatgctgatggtggtgatgatgatgatcaagggagtgatgatgaatacagtgatgatgatgacatgagttggaaagtgagacgtgcagctgcgaagtgcttggatgctgtagttagcacaaggcatgaaatgcttccagaattctacaagaccgtctctcctgcactaatatccagatttaaagagcgtgaagagaatgtaaaggcagatgtttttcacgcatacctttctcttttgaagcaaactcgtcctgtacaaagttggctatgtgaccctgatgcaatggagcagggagaaacacctttaacaatgcttcagagtcaggttcccaacattgttaaagctcttcacaaacagatgaaagaaaaaagtgtgaagacccgacagtgttgttttaacatgttaactgagctggtaaatgtattacctggggccctaactcaacacattcctgtacttgtaccaggaatcattttctcactgaatgataaatcaagctcatcgaatttgaagatcgatgctttgtcatgtctatacgtaatcctctgtaaccattctcctcaagtcttccatcctcacgttcaggctttggttcctccagtggtggcttgtgttggagacccattttacaaaattacatctgaagcacttcttgttactcaacagcttgtcaaagtaattcgtcctttagatcagccttcctcgtttgatgcaactccttatatcaaagatctatttacctgtaccattaagagattaaaagcagctgacattgatcaggaagtcaaggaaagggctatttcctgtatgggacaaattatttgcaaccttggagacaatttgggttctgacttgcctaatacacttcagattttcttggagagactaaagaatgaaattaccaggttaactacagtaaaggcattgacactgattgctgggtcacctttgaagatagatttgaggcctgttctgggagaaggggttcctatccttgcttcatttcttagaaaaaaccagagagctttgaaactgggtactctttctgcccttgatattctaataaaaaactatagtgacagcttgacagctgccatgattgatgcagttctagatgagctcccacctcttatcagcgaaagtgatatgcatgtttcacaaatggccatcagttttcttaccactttggcaaaagtatatccctcctccctttcaaagataagtggatccattctcaatgaacttattggacttgtgagatcacccttattgcaggggggagctcttagtgccatgctagactttttccaagctctggttgtcactggaacaaataatttaggatacatggatttgttgcgcatgctgactggtccagtttactctcagagcacagctcttactcataagcagtcttattattccattgccaaatgtgtagctgcccttactcgagcatgccctaaagagggaccagctgtagtaggtcagtttattcaagatgtcaagaactcaaggtctacagattccattcgtctcttagctctactttctcttggagaagttgggcatcatattgacttaagtggacagttggaactaaaatctgtaatactagaagctttctcatctcctagtgaagaagtcaaatcagctgcatcctatgcattaggcagcattagtgtgggcaaccttcctgaatatctgccgtttgtcctgcaagaaataactagtcaacccaaaaggcagtatcttttacttcattccttgaaggaaattattagctctgcatcagtggtgggccttaaaccatatgttgaaaacatctgggccttattactaaagcactgtgagtgtgcagaggaaggaaccagaaatgttgttgctgaatgtctaggaaaactcactctaattgatccagaaactctccttccacggcttaaggggtacttgatatcaggctcatcatatgcccgaagctcagtggttacggctgtgaaatttacaatttctgaccatccacaacctattgatccactgttaaagaactgcataggtgatttcctaaaaactttggaagacccagatttgaatgtgagaagagtagccttggtcacatttaattcagcagcacataacaagccatcattaataagggatctattggatactgttcttccacatctttacaatgaaacaaaagttagaaaggagcttataagagaggtagaaatgggtccatttaaacatacggttgatgatggtctggatattagaaaggcagcatttgagtgtatgtacacacttctagacagttgtcttgatagacttgatatctttgaatttctaaatcatgttgaagatggtttgaaggaccattatgatattaagatgctgacatttttaatgttggtgagactgtctaccctttgtccaagtgcagtactgcagaggttggaccgacttgttgagccattacgtgcaacatgtacaactaaggtaaaggcaaactcagtaaagcaggagtttgaaaaacaagatgaattaaagcgatctgccatgagagcagtagcagcactgctaaccattccagaagcagagaagagtccactgatgagtgaattccagtcacagatcagttctaaccctgagctggcggctatctttgaaagtatccagaaagattcatcatctactaacttggaatcaatggacactagttagatgtttgttcaccatggggaccattacatatgaccatacaatgcactgaattgacaggttaatcataagacatggaaagagaagtgtctaaaagcttcaaaatgttccacttttttttccttcatggagactgtttgtttggctttcttccattgttgtttttgtagcatttatttcagaaatgtgtatttccataatccagaggttgtaaaaccactagtgttttagtggttacagcaacatttgaaatggaaactaaaagttaggattttatggagtatggagatagggtccagtatctatttaccctgtaatgtttaggattaaaatgttaaaattttgtgaccatgaatttctttcttttataaattttctcatttaaaaatcaaaaatcttgcaaaacaaaaaccatgtttctttttcttgtataactttttgttttcagcaacataaattgatttttagctggcagacaagaatatccatataagatttgttaaccatttcagagagtttggcaatttttaaaagataataaggtatcatttttaagtatgaaaattaacaatatccctgttgcgcacactaattttgcatgagtaagtttacaaatatgtatcgtctgtaaagcagcatgtgcagattattcataatatagaagttaaaataagtattagtgcaattttcagatatttatttttgcacagaaaacacattatctggagagaaagaaaggagaatttttgagacttgggttttcttaatgccagtgtgaatttgcagatgttttcagaaaatcaagtcacagtaacaatttgccacttttttctattataaatcttcttacttaaattttgaatatttagtttttctcagttacccatttgtgtgtgtgtgattccacttagaaattcttaaaaccagatttttctttcattccgtttggatgtctacattccttatcaaaggatataaatactgtgtatgcttttgaattttatttttaggaaaattctgaagccagctatcacaggtttgttagctaataatagtattttcttttagttgagttaggtttttccccatctcctgtagagcgaatttacatattgtattgggtaagtgttcactacttttcctgattaagggatctgtgctggggaacaaagcttttgcagtaccttatattgtagttaaaattttatttaacatatccttcagtgagctcatttcacactgtagcctcttccttaaaatttgtggtgctcctgtaacagtaagaactaattctgaaataaaagacatctcctaatgctgtgcaaacatagtttacatgtattgaaggaggcagttgttaaattgagtgaccaatttaagcaatcagatatttgaaaactgcaccctttagttttgaaactgtgaattagaaacacttttcctgctgtattactacctgctttaacatccaaatatacagtgattttaaatgataacatactgtggttattagattaacagcttgattttgaatgttcagatgataatgcagaagacatcacttctagtaaggattttgactagtgcattgatgttgaagttggtgccatttcaaaatgtggcaggtgataatcttttaccataatttgcataaaactgtaatagaagtttattttgagatgttagtatattatgtactatgcatttctgtggtatagatgttgtggatatatttaagtatttggttacatggttttacaataaattacaatactgcaggctctaggactgaacaggagactgacatgcatatgttgtgtgaatgtcttagttgggtaaagttaaatccaaatacttcaactggctttttcttcagtttgtttgtttttaactttcaagatgcatgttttgttttgttttgctttgtttttgtctcttaagccaattcatttttctaacagttgaaattcttttagtactaaagaaatagatactgctcttttatggctttagtgtttatatacctgtttatatgcatacattaacaaaattagtaacagcagtgcttagaatttcaatgctgtgtcatactgatgattaactccatactcctagtggtgatgtggtccagatactggaatggaagtggcaggatgtggagtccagacatagtctaccactcatgctacttactagtaatattaaggtgttaaacttaggaatttgtcacatgtaggttcctgaggagatctaaaagttaatacaaaaccaagctgtttactgattttcatgagaacatttaagttagtttaggtctacctgatttattttaaaagaaggcagagggctggacgcagtggcttacgcctgtaatcccagcactttgggaggccgaggcgggcggatcacgaggtcaggagatcgagactatcctggctaacactgtgaaaacccatctctactgaaaatacaaaaaattagctgggcgtggtggcagacgcctgtagtcctagctgctacagctgaggcaggagaatggcgtgaacccaggaggcggagctggcagtgagccgagatcacgccactgcactctggcctgggcaacagagcgagagtctgtctcaaaaaaaaaaaaaaaaaaaaggcaggaaggaaatttggtatggcagggcctaacctaaaaggttatttataaaatcaatagcactgaatgataatttttttaatgacagtcatgtattttattaatgatatctgaaagctgcttaaccattaggaattacaattctttatggttggagtatgatgatttcatcaaatgtttgaatatttacataatttttatgtaaccataattaaaccaaattagtctttttttcttcatacttttcttcggtaaatagtgaagaaataatgggcatatctaattaaccagttctagtgggtgttgtgatatctttatatctagttcagtctcagatgtatgaatatgattatatagtcatgattgaagttcaaaatgaggaagtatacaaaatcctcagccactgaaaaattcagttaacttgtttatactcctgtaagctctagttagtcacaagacaaagtatatagtaacactttgtaatgaagtaacattttctgcccacattaattttactaaagacctaaattgttaaaattaattgccaatctctggatatattatgcttagtaagtgttttgaaattaaagaccttaaacatttcagcaagtaaattttggattctagctctgttttaaattgaatcctaattttcaaaccactgctaccccagattcatacctgtttttgaaatcttgtttatggaatggaaaattgacagtatggtaatagtttattgactgattggacaaaggatattctggttttaactgacttttccatttaaataaaattcatttgataattttggttgcaaaagtggaacacagtggaagtatttggctacaggctacccaaatctcatcagataaggctgttttcttaaaggaaatgcaaaatgaaatcatatgttttccttttccaatacagtaaattgcttgttttcctatgaatatcagaaaagattttgtaaacacctttgctgtagtttcaggcaagatctttcagcaacatgtttttgctctttgtaacttagaaagttagctctgaatccaaaaactactgaagtgagtaatgcatataattttacttttttggaccctataatgccagtgtgtcaggtttcagaatgatatttagtagacagaaatacctaattttgttttggaatcttaataccctgtcctcttcataactttctagtggtgattttagcaagtttaattattttgctgaggtcttagaagacagaaagcttatgctatgtaaagtgacattgtttccagattaggaagtattggaattaatttgctattgccagtaagtaatggttgatggatattaagtgattttagtctagaatgctctcaaaaaaatagtaaagaattgtacttcagggccagatggcagctcacgcctgtaatctcagcactttgggaggccaaggtgggggatcacttgaagacaggagttggagaccagctctaggcaacatagtgagaccctgtctctaccaaaaagaagaaaaaagaaatcaacaacatgcaaccataagaatggatgagatggccctaaaagaataaggattacatataatgagaagacgtgtgggctgaaatacctagtgaacaatatttaagggaaactgaagtgcaaatggcctcacaggtttgtttttgtgtttaagacaaggtctcactctgttgcctggactggagtacatagcacgaacatggtttactgcacctcagcttcctgggcacaagtgattctcccacctcagcctcccgagtagctgggagtataggtgtgtgccaccacgtccagctaatttttttatttccttgtggagatggggtctcatgaccttgtccaggatgatctcaaactcctgggctcaagcaatcctgtgttggcctcctaaactgctgagattattgcaagtgcctccttgcccagccacatgttgttgatttcttttttctttttttttctttcttaatttttttttttttttttttttttgagattgatggagtcttgctttgtctcccaggctggagtgcagtggcgcaatatcggctcactgcaacctctgcctcccgggttctagctattctcctgcctcagcctcccaagtagctgtgattacaggcgtgtgccaccatgcccagctaatttttgtatttttagtagagatggagttttgccatgttggccaggctggtttcaaactcctgatcttaggtgatacacccgcctcggcctcccaaagtgctgggattacaggcgtgagccacgtcccccagccagtttcttaatctatacatctagcccagtccatgcccctgtttcagactattatatccaaccacctgctatacatctcataaaggtatctcaaacacagcatatctaaagctgaagtcatcatcttgccctggtttttcctgtctctttgctgatggcatcccatttacccagtcattcaaactggaaatctaaaagcctcacttagcaagagtttggaggcagaatatgataaagaacaaggactctgggaggccaaggcaggtggattgcttgaggtcaagagttcgagaccagtctggccaacatggcgaaaccccgtctttgctaaaaaaacacaaagaaattagctagacgtggtggcacatgcctgtagtcccagctgtgtgggaggctgaggcaggggaattgcttgaacctgggaggtggaggttgcagtgacccaagattgcatgcaccactgcactccagcctgggtgacaaagcgagaccctgtctcaaaaaaaacaaggactctacagatagatagacatcatatatcatattagtttgaatcctggctgttagctgttagacttgggcaaataatttaacctcaactttccctatctataaaatgggaattaaaatatttgcaccttatagggttattgtgaggattaaataggaacattgtataaagcacttaaaacagtacctgggacatactaagtaatataattgttaactcttactagcattctgtcccttttatttcctaaatatctctcatgcccatctcctaaatatctctttcctaaatatctctcatgcttttggcttaagacctcttttcctccttatctattgactggactgcggcaaatgcctgctaatcgttatttttgtgttcattcatttagcaagccaatttattacgcgcttagggtgctgccagggctacaaaagctgttgagactgtacttgatatgaagaagcttgctgattatcatgggaagactgacataaggaagcaccataaaattctgctgtatgagaggtatacacgggatactgggggttaataattgagggtatggtccattcaacatgagtgagacagaaacaattcataaaggagatgaaatgtcttgaggaatgagctcttagaagaatagttttcaaatgagtgtgcatcacagtcacctgtaagacttattaaaacagatcgctgggccctacacccagaggctgtggttcagtaggctgtagtaaaccagtaatttgtatttctatgacgttcccaggttctaatgctgttccccaaggccacaccttggaaaccaccacattaaaatacccagaaggcattaattcccagtccttcctctacacagctgcaaaacaatggtcctgaccatttcatctttgcactacatccttcactgtctctcttttgcccataggataagtacaaactagatctggttactgcctgccccaccagcctcagcatctctcacaactaggactaactttttcttctgacaactataaaatatttcccttgccttctcaagtttgctcaaggtcaagttatgccttttgcctggaatgacttgacttctcttttgttttacttagctggctgcttttcatcttgtaggttaggtcaaggactccaggaagtcttccctggacaagtaatgaagagggcataatccaagggccaactcccatgtttggaacctgactccattttcaggcacgtaatattgtcaaattccttttaaaagcacctgtctgtctgttaacgttggtgcagatactgctattcccctcctccataccattgctgatggttactgagggtatgggaagggccgactagtccagctgttcacaaacagcccttaatgtcaaactgaatactgccaacgtagttccagtttctgtatctaaagactcagcttggagtcacttgtctggactaaaagtaacccctccttgtctggtttgtgactttctgtactctgatgcccccagctttctgccttctagaaatttgtcagaatttccaaaattcttgggccttccttcttgctctatatatggttttggattcattccttttaaaaaatatttactgtcatttcagtagaattttgacacaataaatataagcacatcaga

SEQ ID NO: 131 - protein, 1230 aa, Homo sapiens
MASASYHISNLLEKMTSSDKDFRFMATNDLMTELQKDSIKLDDDSERKVVKMILKLLEDKNGEVQNLAVKCLGPLVSKVKEYQVETIVDTLCTNMLSDKEQLRDISSIGLKTVIGELPPASSGSALAANVCKKITGRLTSAIAKQEDVSVQLEALDIMADMLSRQGGLLVNFHPSILTCLLPQLTSPRLAVRKRTIIALGHLVMSCGNIVFVDLIEHLLSELSKNDSMSTTRTYIQCIAAISRQAGHRIGEYLEKIIPLVVKFCNVDDDELREYCIQAFESFVRRCPKEVYPHVSTIINICLKYLTYDPNYNYDDEDEDENAMDADGGDDDDQGSDDEYSDDDDMSWKVRRAAAKCLDAVVSTRHEMLPEFYKTVSPALISRFKEREENVKADVFHAYLSLLKQTRPVQSWLCDPDAMEQGETPLTMLQSQVPNIVKALHKQMKEKSVKTRQCCFNMLTELVNVLPGALTQHIPVLVPGIIFSLNDKSSSSNLKIDALSCLYVILCNHSPQVFHPHVQALVPPVVACVGDPFYKITSEALLVTQQLVKVIRPLDQPSSFDATPYIKDLFTCTIKRLKAADIDQEVKERAISCMGQIICNLGDNLGSDLPNTLQIFLERLKNEITRLTTVKALTLIAGSPLKIDLRPVLGEGVPILASFLRKNQRALKLGTLSALDILIKNYSDSLTAAMIDAVLDELPPLISESDMHVSQMAISFLTTLAKVYPSSLSKISGSILNELIGLVRSPLLQGGALSAMLDFFQALVVTGTNNLGYMDLLRMLTGPVYSQSTALTHKQSYYSIAKCVAALTRACPKEGPAVVGQFIQDVKNSRSTDSIRLLALLSLGEVGHHIDLSGQLELKSVILEAFSSPSEEVKSAASYALGSISVGNLPEYLPFVLQEITSQPKRQYLLLHSLKEIISSASVVGLKPYVENIWALLLKHCECAEEGTRNVVAECLGKLTLIDPETLLPRLKGYLISGSSYARSSVVTAVKFTISDHPQPIDPLLKNCIGDFLKTLEDPDLNVRRVALVTFNSAAHNKPSLIRDLLDTVLPHLYNETKVRKELIREVEMGPFKHTVDDGLDIRKAAFECMYTLLDSCLDRLDIFEFLNHVEDGLKDHYDIKMLTFLMLVRLSTLCPSAVLQRLDRLVEPLRATCTTKVKANSVKQEFEKQDELKRSAMRAVAALLTIPEAEKSPLMSEFQSQISSNPELAAIFESIQKDSSSTNLESMDTS

SEQ ID NO: 132 - DNA, 2645 bp, Homo sapiens
  source 1..2645: mol_type = other DNA
agtgcagacgcggctcctagcggatgggtgctattgtgaggcggttgtagaagagtttcgtgagtgctcgcagctcatacctgtggctgtgtatccgtggccacagctggttggcgtcgccttgaaatcccaggccgtgaggagttagcgagccctgctcacactcggcgctctggttttcggtgggtgtgccctgcacctgcctcttcccccattctcattaataaaggtatccatggagaacactgaaaactcagtggattcaaaatccattaaaaatttggaaccaaagatcatacatggaagcgaatcaatggactctggaatatccctggacaacagttataaaatggattatcctgagatgggtttatgtataataattaataataagaattttcataaaagcactggaatgacatctcggtctggtacagatgtcgatgcagcaaacctcagggaaacattcagaaacttgaaatatgaagtcaggaataaaaatgatcttacacgtgaagaaattgtggaattgatgcgtgatgtttctaaagaagatcacagcaaaaggagcagttttgtttgtgtgcttctgagccatggtgaagaaggaataatttttggaacaaatggacctgttgacctgaaaaaaataacaaactttttcagaggggatcgttgtagaagtctaactggaaaacccaaacttttcattattcaggcctgccgtggtacagaactggactgtggcattgagacagacagtggtgttgatgatgacatggcgtgtcataaaataccagtggaggccgacttcttgtatgcatactccacagcacctggttattattcttggcgaaattcaaaggatggctcctggttcatccagtcgctttgtgccatgctgaaacagtatgccgacaagcttgaatttatgcacattcttacccgggttaaccgaaaggtggcaacagaatttgagtccttttcctttgacgctacttttcatgcaaagaaacagattccatgtattgtttccatgctcacaaaagaactctatttttatcactaaagaaatggttggttggtggttttttttagtttgtatgccaagtgagaagatggtatatttggtactgtatttccctctcattttgacctactctcatgctgcagagggtactttaagacatactccttccatcaaatagaaccactatgaagctacctcaaacttccagtcaggtagttgcaattgaattaaattaggaataaataaaaatggatactggtgcagtcattatgagaggcaatgattgttaatttacagctttcatgattagcaagttacagtgatgctgtgctatgaattttcaagtaattgtgaaaaagttaaacattgaagtaatgaatttttatgatattccccccacttaagactgtgtattctagttttgtcaaactgtagaaatgatgatgtggaagaacttaggcatctgtgggcatggtcaaaggctcaaacctttattttagaattgatatacacggatgacttaactgcatttttagaccatttatctgggattatggttttgtgatgtttgtcctgaacacttttgttgtaaaaaaataataataatgtttaatattgagaaagaaactaatattttatgtgagagaaagtgtgagcaaactaacttgacttttaaggctaaaacttaacattcatagaggggtggagttttaactgtaaggtgctacaatgcccctggatctaccagcataaatatcttctgatttgtccctatgcatatcagttgagcttcatataccagcaatatatctgaagagctattatataaaaaccccaaactgttgattattagccaggtaatgtgaataaattctataggaacatatgaaaatacaacttaaataataaacagtggaatataaggaaagcaataaatgaatgggctgagctgcctgtaacttgagagtagatggtttgagcctgagcagagacatgactcagcctgttccatgaaggcagagccatggaccacgcaggaagggcctacagcccatttctccatacgcactggtatgtgtggatgatgctgccagggcgccatcgccaagtaagaaagtgaagcaaatcagaaacttgtgaagtggaaatgttctaaaggtggtgaggcaataaaaatcatagtactctttgtagcaaaattcttaagtatgttattttctgttgaagtttacaatcaaaggaaaatagtaatgttttatactgtttactgaaagaaaaagacctatgagcacataggactctagacggcatccagccggaggccagagctgagccctcagcccgggaggcaggctccaggcctcagcaggtgcggagccgtcactgcaccaagtctcactggctgtcagtatgacatttcacgggagatttcttgttgctcaaaaaatgagctcgcatttgtcaatgacagtttcttttttcttactagacctgtaacttttgtaaatacacatagcatgtaatggtatcttaaagtgtgtttctatgtgacaattttgtacaaatttgttattttccatttttatttcaaaatatacattcaaacttaaaatta

SEQ ID NO: 133 - protein, 277 aa, Homo sapiens
MENTENSVDSKSIKNLEPKIIHGSESMDSGISLDNSYKMDYPEMGLCIIINNKNFHKSTGMTSRSGTDVDAANLRETFRNLKYEVRNKNDLTREEIVELMRDVSKEDHSKRSSFVCVLLSHGEEGIIFGTNGPVDLKKITNFFRGDRCRSLTGKPKLFIIQACRGTELDCGIETDSGVDDDMACHKIPVEADFLYAYSTAPGYYSWRNSKDGSWFIQSLCAMLKQYADKLEFMHILTRVNRKVATEFESFSFDATFHAKKQIPCIVSMLTKELYFYH

SEQ ID NO: 134 - DNA, 3134 bp, Homo sapiens
  source 1..3134: mol_type = other DNA
ggtgagcgctggggctgcgcgggcggcaggcaacggctgaggcggcggcggcggcggcggcggcgtgggttgggctcgagcgggcggcggcgcctcagactccccggaacgggagcccacgcgggcgggcgcctgaaacaaagggaagcgggcgtccgggcgccgcgggtgggcggtcagtcggtcagcgcggagccagccagcgggtgcccgcgcaagccccgagcgcggccggccggcgcggcctcagggcgggaagatgccgcgcgtcgtgcccgaccagagaagcaagttcgagaacgaggagttttttaggaagctgagccgcgagtgtgagattaagtacacgggcttcagggaccggccccacgaggaacgccaggcacgcttccagaacgcctgccgcgacggccgctcggaaatcgcttttgtggccacaggaaccaatctgtctctccagttttttccggccagctggcagggagaacagcgacaaacacctagccgagagtatgtcgacttagaaagagaagcaggcaaggtatatttgaaggctcccatgattctgaatggagtctgtgttatctggaaaggctggattgatctccaaagactggatggtatgggctgtctggagtttgatgaggagcgagcccagcaggaggatgcattagcacaacaggcctttgaagaggctcggagaaggacacgcgaatttgaagatagagacaggtctcatcgggaggaaatggaggtgagagtttcacagctgctggcagtaactggcaagaagacaacaagaccctagtcctggttccaatttaggtggtggtgatgacctcaaacttcgttaattaatagcacagcagatgtgtgctgcccatctttacatacacattgcttctagttggcagaaataattgattaaaagaccagaaactgtgataactggaggtactacggtctatttctcaaccttaggcagtaatagacatcacaaactgccatggttttgcactatgattataatacctgcatttctaattttttaagcatgtagccagtaataatttgaagttttttttctatgcaagcttaccttgttggcattattttagggagttgaaactatcaactgtaaagctccttttcttccactttaatttaaaagttcatgtcatttaaaaacaagtcaagaaattaaaattgtatcagagggttttctctaatcattttttctatttttttttttgtacttctagatgttttggttatacagcttcattttagatgagcattcttattttttgttttgtttgccccatttccttttgtgtttttatagtctatagcattttaaaactgctgatgttgtttgcattatttacaggctaaaaacttagtagcatagagctgtctgccacagccttctgacaaagtttacagttattaaagttgcagtatccttttaaatgctagtaatcagcactctttcttttttttttttttaatagagacagggtctcgcagtgttgcccaggctggtctcgaactcctggcatcaagcgatcctcctgccttagcctcccagagtactgggattacaggctctttctttttaaacataaaagttttaaattggtattaactctgtactctgccctagattgttttagcttctgttctgtaatcatgagtttggttggagatattctccatagatgatcttctactgaaatgcctaaagaagtcacaggctggcttctgttttattcagggatttttttaaaaagtcaatcagaaaagggatactggagcttcttcatgtatgtaacagcatattaaactggagacagtgatgaatcagctacaaaggtaatattgtattaaaatcatgtttaagatagctgcttttatgtgtattttatattgcatgcttttgtaaaaacatgctgggtgatgaaagattagttttagagagaaaatgttcatctgtgcagaggatgcattttcttccattaattctggaaaaaacgttcacagttatatatatggtattttgcaaaaggactattaatagaaccttttgagatgaattaatgtaagaatattttttaaataggcttactgtcaaattgcaactttttttttagatacagagtggaaaacagtgctaagtcatttggcacctccttacaaatatttttcatggtcacatttattaaatgttactacatttctgaatttttgaaaaatgtattttatcattaaatggcattattttaaagggtgaaaaactgacacagtcaattcagaaaatggactgaagtctgaataaggtcattgcatttaaaaagcatataactgtacttgactgatgagggaggtgttactttcattgtatataggtcttatttcataaacagatatcctgtatcaaataaaagtatttgttatatatttgaagttatgcatggaaaggagtgtgtttaaattgttacaaacaataatgcgtcattaaaggccatgctgatcttgcataactataagtactatgaatgaatttggttggttttggtgttgtacagctcacatgtttacacactcagtgccctaatttcccctgagggaatcgctttttaagtgatccttacagtggtgttttatgttactttattacagagctccttggttttttacttctgcacttaaatttttttaaataacatgatgatggtacattttcctctattgtctagctaagggctttcggtccaccagtaaataagatcaaatgctcttaaatgttcctgttaccatcctaatgtaaatactggatttttctgtcatttagcaccatgctgcttctgtctgtcttaatgctggcattaagatcatgagccctttttctccagtagtacaggctttgaaaactacttctattaagttattgatgcaatttgatattttttcataatctatatttaaacaaaattacatcattgcatcatcttttctaaattcatctccattaaaacttgccttaagctaccagattgcttttgccaccattggccatactgtgtgtttgtttgtttaatttactttcacaataaacttctgtgtagtaaaaa

SEQ ID NO: 135 - protein, 182 aa, Homo sapiens
MPRVVPDQRSKFENEEFFRKLSRECEIKYTGFRDRPHEERQARFQNACRDGRSEIAFVATGTNLSLQFFPASWQGEQRQTPSREYVDLEREAGKVYLKAPMILNGVCVIWKGWIDLQRLDGMGCLEFDEERAQQEDALAQQAFEEARRRTREFEDRDRSHREEMEVRVSQLLAVTGKKTTRP

SEQ ID NO: 136 - DNA, 9525 bp, Homo sapiens
  source 1..9525: mol_type = other DNA
acttccgcgttgcgctgcccgagccgagagcgcggccaaggccgctcccccacccccgggggcacttggaggactcgggactcccccgcaggtcagcgcccggcgcatctggtgttttcgctgccgaggataggacgacgagcgcaatcgggagctccgccgcccggattcctgcttccctggggcccggaggctgctgcgtaccccactgtgacctggaacccagggacccgagtcccgacccggattatcgtggcgcttttcccggccggctctggtgctcggtgtccctccgccgccgctcccgtttccggcgggggagatggccaggatctgacccgggaggaggccgcacccgcgccgcgctctgcggctggctctaggcgatgccgagcagctcggacacggcgctggggggaggcgggggcctgagctgggcggagaagaagttggaggaacgccgcaagcggaggcgattcctgtcccctcagcagccgccgctgctgttgccgctcctgcagccgcagctcctgcaaccgccgccgcccccgccgcctctgctcttcctggctgctcccggcacggccgccgccgcagccgccgccgccgcggcctcctcctcttgcttcagcccgggcccccctctggaggtcaagcggctggcgagaggcaagaggcgcgcaggagggcggcagaagcggcgtcgcgggccccgcgccgggcaggaggcggagaagcgtcgggtcttctcgctgccccagccgcagcaggacggcggtggcggtgctagtagcggcgggggtgtgaccccgctggtggaatacgaggatgtgagctcccagtccgagcaggggctgctgctggggggggccagcgcggcaacggcggcgacggctgccgggggaacggggggcagcggcgggagtccggcctcctcctccggcacccagcggcgcggggaggggtcggagcgcaggccccgccgggaccgccgcagcagcagtggccgcagcaaggagcgccaccgcgagcaccggcggcgggatgggcagcgcggtggcagcgaggcctccaagtcccgcagccgccacagccacagcggcgaggaacgggccgaggtcgccaagagcggcagcagcagcagcagcggcggccgccggaaaagcgcttcggccacatccagcagcagtagcagccgcaaggaccgggactcgaaggcccaccgcagccggactaagtcgtccaaggagccgccttcggcctacaaggaaccgcccaaggcctaccgggaggacaagaccgagcctaaggcctacaggcggcggcggtccctcagcccactgggaggccgggacgacagcccggtgtcccacagggcctctcagagcctgaggagccgcaagtcccccagcccggcaggaggtggcagcagcccctattctcggcggctgccgcgctccccgagcccctacagtcgccgccgctcccccagctacagccgccacagctcctacgagcggggcggcgacgtgtcccctagtccctacagcagcagcagctggcgccgctctcgcagtccctacagccctgtgctcagacggtctggaaaatcccgaagcagaagcccgtattcatctaggcattcaagatctcgtagcaggcacagattgtctagatccagaagtcgtcattctagtatttctcctagcacactaactctgaagagtagcctggcagctgaattgaacaagaataaaaaagcacgagcagcagaggcagcaagagccgcagaagcagcgaaagctgcagaagcaactaaggctgctgaggctgctgccaaggctgcaaaagcttcaaacacttctacacctaccaaggggaacacggaaactagtgccagtgcatcacaaacaaaccatgtgaaggatgtgaagaaaattaaaattgaacatgcaccttctccctcaagtggtggaactttaaaaaatgacaaagcaaaaacaaagccacctcttcaggtaacgaaggtggaaaataatttgattgtagataaagccaccaagaaagcagtcatagttggaaaggagagtaaatctgctgctacaaaggaggaatcagtatctcttaaagagaaaaccaaaccacttacaccaagcataggagccaaggagaaggagcaacatgtagctttagtcacctctacattaccaccgttacctttgcctcccatgctgcctgaagataaagaagctgatagcttacgaggaaatatttcagtaaaagcagttaaaaaagaagtagaaaagaaactccgatgtcttcttgctgatttaccgctgccccctgagctaccaggaggagatgatctttcaaagagtccagaggaaaagaaaacagcaacacagttacatagtaaaaggaggcctaaaatatgtgggcctcgctatggtgaaaccaaagaaaaagatattgactggggaaaacgctgcgtggataaatttgatatcatcggaattattggagaaggtacttacggacaagtttacaaagccagggataaagacactggagaaatggtagccttaaaaaaagtacgtctggataatgaaaaggaaggctttccaattacagcaattcgagaaattaaaattctccggcagcttacccatcagagtattatcaatatgaaggaaatagtgactgataaagaagatgctttggatttcaagaaggacaaaggtgcattttatctggtgtttgaatatatggaccatgatctgatgggactactggaatcaggcttggttcattttaatgaaaatcacataaagtcatttatgagacagctcatggagggtctggattattgtcataagaagaactttttgcatagagatattaaatgttccaatatccttctaaataatagagggcagataaaacttgcagactttggacttgctcgattgtatagctcagaagaaagtcggccgtatactaacaaggtaattactttatggtaccgtccacctgaactgctactgggagaagaacgatacacaccagccattgatgtatggagctgtggctgtatccttggcgaactcttcactaaaaaacctatatttcaagcaaatcaggaacttgcacaactagaattaataagccgaatatgtgggagtccatgtcctgcagtgtggcctgatgtaatcaaactaccatatttcaacaccatgaaaccaaagaagcaatatcgtcgaaagttaagagaagaatttgtttttattcctgcagctgcgctagacttatttgattacatgcttgccttggatcctagtaagcgctgcactgctgaacaggctcttcagtgcgagttcctccgagatgtggaaccctcaaaaatgcctccaccagatctccctttatggcaagattgtcatgagttatggagtaaaaagcgaagaagacagaagcagatgggcatgactgatgatgtttccacaattaaagcccccaggaaggacttgtctctgggcttggatgacagcagaaccaacacaccccagggtgtgctgccatcttcacagctgaaatctcagggcagctcaaatgtggcacctgtaaaaacaggccctggacagcacttaaaccacagtgaattggcaattctactaaacctactacaatctaaaacaagtgttaatatggctgattttgtccaagtgttgaacattaaggtaaactctgagactcaacagcagctaaataaaataaaccttcctgctggaattttggcaacaggtgaaaaacagacagatccatcaacaccacaacaggagtcttcgaaaccgttgggaggaattcagccttcttctcagaccatccagcctaaagtggagactgatgctgcccaggcggctgtgcagagtgcatttgcagttctgttgactcagttaataaaggctcagcagtcaaagcagaaagatgtgctactagaagagagggaaaatggatcgggacatgaagcgtcattacaactcaggccacctccagaacctagcactccggtgtcgggacaagatgacctcatccagcatcaagatatgaggatcttggagctaacgccagaaccagaccggcctcgaattctgcctcctgaccaacgacctcccgagcctcctgaaccaccaccagtcactgaggaagatctagattatcggacagaaaaccagcatgtacccaccaccagttcttcattaactgaccctcatgccggagtgaaggcagccctgttacagctgcttgctcagcatcagccccaggatgaccccaaaagagaaggtgggattgattatcaagcaggagacacttacgtgtccacttcagactacaaggacaactttggatcctcttctttctcttctgctccttatgttagcaatgatggtctaggaagcagttctgctccaccactagaacgacgtagtttcattggaaattcagatattcagtctttggataactacagtactgcttcatctcattctggtggtccacctcagccttctgccttttctgagtcatttcccagttcagtagctggatatggagacatttacctcaatgctggtcccatgttgtttagtggagacaaggaccatagatttgaatatagccatggtcctattgcagtcctggcaaacagcagtgacccttccacggggccagagagtactcatcctttgccagcaaagatgcacaactataactatggtggtaacttacaggaaaatccgagtggccccagcctcatgcatggacagacctggacttctcctgcccaaggacctggatattcacaaggatacaggggacatattagcacatcaactggcagaggcagaggcagagggttaccatactgagtatctgtttttcctcaggcacatcatttttatctggaaagacttttctagctgcaatttaaggcagcaatccaagagacttgaataataataattcaacaacagctttatttttatgtggagaagggtcttgcatacaatagtttaaaaaagacaaaaaaaacctttgcttaaattcatgctgttctaaaaactagatcgattgtacatcttcacaaattctagttaacaattttattttgtattcttgcagttttaagtggatgctaattttaggggcataagccttttatggccctcttgcagatcttctgaactatgcacatttgtgctttttttgtaagtttggaccaacttttatgtaacaaacagcccctccccacctccagttttacaacaatcagaaagggcactgatttatttggtatttttctttttacaaagctacctttagtcaaaggtcactgtcagtctttgcacctgctttcagtgttattgtgaaaggtgtactttgtgctcatttcagaaaataaaacacaacctttctcttgatgcaacagttttataaaaaaaaaaatggtcaacgttatttttgttttgttttgcagattatcaaagcctagcaaaatgcatttaaatgaaatagtgggttttatatgaaaactatgggtggggtggggagggaaagtaagtgccttaacaggtaagcttaaggtctgaaaaaaatagttaacttttacccccatttgtcttttaaagggaatcaatgcattaaaaaggcaagaaactctgaagtttcaggggctgcctgttcagttcctgttaggtccattccctctgcttgtcacactttctccttttctgcctgtctttgggctgtgttgcctttcactaccaccttctcttgataggggagtgagagcaaagaaagggagtagaactgcaatcagtacatattgtttgagaagttctacaaagttttgtcatttaaatggttgaaagtaatagctccaggagaattttagagtaccattttctttcaggctgccatattatccctgtttccatttgccatggataattggagggtcatggtatagaagcaagagttaataacagaacttgcctaaatgtgttaaagttcatgggggaggggtggcaaataccgtattttaagttatgcaattgcccttttaagaaagtcaattctattcacttgttaactagaaacattgcttagattgaatttattgaagcaaaaagaaaaggcaatgagagagaacttttatcttccttcctgtcacattctgtaaagttgattatgacttctgccagacttagagcaacaactttagttcattttaacatttttttttaatgaagagcatcaaagaatggagtagtccttatttaaactgtaatggtgtcaagtctcactgtgtgcacactctcacacatacacacacaattatactaattctagaaaggaaccaaaggtaaataaccagtgtttccattatcactaaatggaaaaattgactggaagttagagttgtgccaattaatcattttgttcatcaactgttctggtaacttatttttttttattggaatcttaaattggaacaactgttacagaatgtatattgctccagttctaaagccagttaaccctgtgccctctaacttatgaaccttcatttcaaaacagtatgtgggaagtcctgtagtttgataagagtaaaattattttaaagaggataatttaccattttactactataaaataagttgatatcagttgaccattttattttttgatggactctttttgttgggagaaagaaatgaatggaagaaaaaaatatgttgcttttatttgaatattgattactaacaacttataaactacattgcaggaaatgaagaaatattttgaaattagcaaaatagcaacagtattcaagtatctgaaattttaatatggtgagtcttagagctttagactttcctataagtgacagtatctaagttattcttaatagtcacacttgataattctgctgaccataagcagctaacctacagttgaagatatttatgtgacatgaatagcctgtgttttaaaaattaaatattttatataaaattgaactgtgtttggatagtttttctaatcaaacatttcagttatatatttatgttgggagagtggctgggaggacagggaaattgttgctttgacattgaaaatttgaactagaacttctaatattatccttacacagcactactgtgagacatactagtcttttatatgtcacttagaagaaaaaatgttgccaattaagccacaatacaatgctaagacgtcatcaattgtaagctgcatcccagattcagacatattatatgaaaatatgtcttataattgatgaaatatgatagtaaaaaattttaatgcttcccttcatagcatttaatattttaattcagtgaatttggattaatagaacaaagttgggaaatcactagttctgtaggttataacagcagtcatcgctgaaaatttgagtgaaatctaaagaacacaaaatattgcttaaattttttggaaaaaagcaggtaagtcagactgcaagttaagaagacaaaaatataaaagatttgacctgccaaaagaagaaagtatttatcttctcccacgtgaaattcccttttgtatttactgacacagcaggtttttctgcatgcaactcagtatgtttcctacgtcttcattatttgttggagagttgcaagtcatttgtgaaaccttaaaatgccaattttaaggagttgtcatttgtggaatgtgaaataaggtaataattctagctgtgattcagagctttattctgtcagcaaatacatagtcagtgcctacaacatgccaggtagtaatctagtccttggggtacatcaataaccgtcaacagtgttaaatcatactttcagtgtgctgacagtgagcaagatttttttaaatgtctggagaagttagtggtatttgctaccctcagctgtatctaaattgcacttaagtgaatgtagggcatgaaaatttgagtatctttttgaaattttaaattgaaatttggatagagatggttatggagagaaatcaaacaactggaatagctgtttgatatcacttaaaagtgataaaattttaagttgaatctggtcagtttgcaatggcctatttgtaagaaatatcaagacttcttgagaaaaatgaaaagtgaatacataaatgcttaaaatctggtacttctgagttaaggttttgctctttgagcttaatccaatttgggatgatttttcatcctagggctttttgttttccttttttatttttattttttctttttttaggggaaggggacttgctttcttttccaaaaaggtgaatccttcttgtaggacataggtaaaaaaaacaaagctgaaatatatgttttgaatatagatagctaattccctgggatataatatcctttcaattttttttttttttttggcccagtctgccttttgatgttttaaaagtctgaacgagatgtcccagtaacctaaaattatccagtcggtcttcttactttacaactaagaaaaataaggcttagaaagagggattgccagaaactttggcagctggattgcctgtgcttgttcctctaagccatacctaaattctgcagtaaatacttaactttttaatagggaaattgcttcaagataacttgaccagtgatacggtaaaataattagactattggactaatggtttaacacaagtggctttaaaaagtctgcttaaaaaacaatttttatttagaaaaaatagaaaaataaaaacatcttcaaaatttaggagcctgaaggggctgtttgtttcatatatggataatctttgaaaaggcaagtcctgtatgtatttttcatttgttgaaagaagattggttatcagtaggcttgcaaacataatttgcttttaagttctttcaaggttttatgcaataaaacctattgatttggaactttaaaaaaaaaaacaacaaaaaaatactttcagggttttgtaatttcaagtggttttttaaggggagcaatagtttgccatttaccaaaggcttctccagataatttcttaaatgtttctacttaaaaataaaagctattaataataagctgtcatgggatccatttgaagacagggaaaatagaaaatttttattgtaaagggaagaacttatccttttaattttatggactaacagagtctgcaggtcttaactcatttcagcctgtcaaatgtgcaattaaaaatgaattttctaattgtattcaaatgaggctctatagtgaatacagaatcactcttctaagttttttcccagttaatttgtttaaaagtgttgtactctcttgcaagaacgtttaaaagttaagtcttgtaactgttaacatctaatgtattaatataagccatttgttttttaccatttttttaaggccgtattcaatagtctgtaaataaattgccgtaacactccca

SEQ ID NO: 137 - protein, 1512 aa, Homo sapiens
MPSSSDTALGGGGGLSWAEKKLEERRKRRRFLSPQQPPLLLPLLQPQLLQPPPPPPPLLFLAAPGTAAAAAAAAAASSSCFSPGPPLEVKRLARGKRRAGGRQKRRRGPRAGQEAEKRRVFSLPQPQQDGGGGASSGGGVTPLVEYEDVSSQSEQGLLLGGASAATAATAAGGTGGSGGSPASSSGTQRRGEGSERRPRRDRRSSSGRSKERHREHRRRDGQRGGSEASKSRSRHSHSGEERAEVAKSGSSSSSGGRRKSASATSSSSSSRKDRDSKAHRSRTKSSKEPPSAYKEPPKAYREDKTEPKAYRRRRSLSPLGGRDDSPVSHRASQSLRSRKSPSPAGGGSSPYSRRLPRSPSPYSRRRSPSYSRHSSYERGGDVSPSPYSSSSWRRSRSPYSPVLRRSGKSRSRSPYSSRHSRSRSRHRLSRSRSRHSSISPSTLTLKSSLAAELNKNKKARAAEAARAAEAAKAAEATKAAEAAAKAAKASNTSTPTKGNTETSASASQTNHVKDVKKIKIEHAPSPSSGGTLKNDKAKTKPPLQVTKVENNLIVDKATKKAVIVGKESKSAATKEESVSLKEKTKPLTPSIGAKEKEQHVALVTSTLPPLPLPPMLPEDKEADSLRGNISVKAVKKEVEKKLRCLLADLPLPPELPGGDDLSKSPEEKKTATQLHSKRRPKICGPRYGETKEKDIDWGKRCVDKFDIIGIIGEGTYGQVYKARDKDTGEMVALKKVRLDNEKEGFPITAIREIKILRQLTHQSIINMKEIVTDKEDALDFKKDKGAFYLVFEYMDHDLMGLLESGLVHFNENHIKSFMRQLMEGLDYCHKKNFLHRDIKCSNILLNNRGQIKLADFGLARLYSSEESRPYTNKVITLWYRPPELLLGEERYTPAIDVWSCGCILGELFTKKPIFQANQELAQLELISRICGSPCPAVWPDVIKLPYFNTMKPKKQYRRKLREEFVFIPAAALDLFDYMLALDPSKRCTAEQALQCEFLRDVEPSKMPPPDLPLWQDCHELWSKKRRRQKQMGMTDDVSTIKAPRKDLSLGLDDSRTNTPQGVLPSSQLKSQGSSNVAPVKTGPGQHLNHSELAILLNLLQSKTSVNMADFVQVLNIKVNSETQQQLNKINLPAGILATGEKQTDPSTPQQESSKPLGGIQPSSQTIQPKVETDAAQAAVQSAFAVLLTQLIKAQQSKQKDVLLEERENGSGHEASLQLRPPPEPSTPVSGQDDLIQHQDMRILELTPEPDRPRILPPDQRPPEPPEPPPVTEEDLDYRTENQHVPTTSSSLTDPHAGVKAALLQLLAQHQPQDDPKREGGIDYQAGDTYVSTSDYKDNFGSSSFSSAPYVSNDGLGSSSAPPLERRSFIGNSDIQSLDNYSTASSHSGGPPQPSAFSESFPSSVAGYGDIYLNAGPMLFSGDKDHRFEYSHGPIAVLANSSDPSTGPESTHPLPAKMHNYNYGGNLQENPSGPSLMHGQTWTSPAQGPGYSQGYRGHISTSTGRGRGRGLPY

SEQ ID NO: 138 - DNA, 978 bp, Homo sapiens
  source 1..978: mol_type = other DNA
gagagcaggcagcgggcggcggggagcagcatggagccggcggcggggagcagcatggagccttcggctgactggctggccacggccgcggcccggggtcgggtagaggaggtgcgggcgctgctggaggcgggggcgctgcccaacgcaccgaatagttacggtcggaggccgatccaggtcatgatgatgggcagcgcccgagtggcggagctgctgctgctccacggcgcggagcccaactgcgccgaccccgccactctcacccgacccgtgcacgacgctgcccgggagggcttcctggacacgctggtggtgctgcaccgggccggggcgcggctggacgtgcgcgatgcctggggccgtctgcccgtggacctggctgaggagctgggccatcgcgatgtcgcacggtacctgcgcgcggctgcggggggcaccagaggcagtaaccatgcccgcatagatgccgcggaaggtccctcagacatccccgattgaaagaaccagagaggctctgagaaacctcgggaaacttagatcatcagtcaccgaaggtcctacagggccacaactgcccccgccacaacccaccccgctttcgtagttttcatttagaaaatagagcttttaaaaatgtcctgccttttaacgtagatatatgccttcccccactaccgtaaatgtccatttatatcattttttatatattcttataaaaatgtaaaaaagaaaaacaccgcttctgccttttcactgtgttggagttttctggagtgagcactcacgccctaagcgcacattcatgtgggcatttcttgcgagcctcgcagcctccggaagctgtcgacttcatgacaagcattttgtgaactagggaagctcaggggggttactggcttctcttgagtcacactgctagcaaatggcagaaccaaagctcaaataaaaataaaataattttcattcattcactca

SEQ ID NO: 139 - protein, 156 aa, Homo sapiens
MEPAAGSSMEPSADWLATAAARGRVEEVRALLEAGALPNAPNSYGRRPIQVMMMGSARVAELLLLHGAEPNCADPATLTRPVHDAAREGFLDTLVVLHRAGARLDVRDAWGRLPVDLAEELGHRDVARYLRAAAGGTRGSNHARIDAAEGPSDIPD

SEQ ID NO: 140 - DNA, 9776 bp, Homo sapiens
  source 1..9776: mol_type = other DNA
acacatactccaggcgggccggggcgcgtcaatatggcggcgcagggctccccctcgagctctccgtcagacgactctaccacctcggggtctctgccagaactgccgccgacctccaccgcgacttcgaggtcgcccccagagtcgaaggggagctcccggagctcgctgcttcagtggacctgccccgaggactcattgcccctagccgtgttttatgggccgctggacgcgaaaaacccgctcctggcctcttgtgagaaggagatccaggagttgttaggctttatgaggaaaaagaaggctttagccaccacggaggaagagaagcacgaattccgccggcgttgtgccacttctttgtttaatatctggactaaatacgcccccaggctgccagcagactattacaacgaaaagcttctgaaggttggagatagcctttgtcaaatgaaagaatacaaactggcccttttacaatgctatggaagatatcttcagcagttcaataccaattttgatgagaataaagtggatgtaactcaattcaaagctacctttttcccaaaaggctttaaagataaaactgctggacttacatttcatgctttgagtggcaaaaatatgtgcaactaccagctggtctgcgacagtgatgaaaacctgaagaataaagaatctgtggtccagtgtctgcatatcttgtcctccttaaggctcatcatgcaagtggctctgccacaagagcatctttgctggattatcttcaatggtaccatttatatttacaccatttgcagaaaactgatggtcataggtcagtcttccaaggccttagagtatctcctgtgggccagcatgtgtatggagtccttggtcccgctcctgtcactcaggtacttgacatggcgcgctactctctacacagctgtttgccagtgctgctatgactgccatgccgggattcacggagaggcatttgctcggcgtgctttggctaaaattgatgagttaaggcaactggaattaatgagttcctcaaaatcccaggaagaatcgcgaagatattttcgagaggccacaatgaagatggcagtgatgatcttcaaaagaggagtctttgaatctagaagaaaaaacaaagctgtctttagacctaagataagaattaacctaagggaagtacaaactttatcatggccacgaactgtcacagagcggctactggatgagatgtttgatagcactgcatcccagtttctggctgtcttggaagctctttctgattcaaataggcgaatactgcaaactggacccattgttacagatgaagtggagattcatgatgttgtctcagaattgtttatggcaggaaaagaacttttgataatgtcaaatattggtgcagatggaatgcttgattttccaaaaacatctcttctggaacttatgataggaagaaaagatgttatttctgtggatgctgctgtgaaatttataaaattagcttttacctatgaggagtggagtttatttgaatcttctgctgtacatcttatttattttctccagaggcaggatgatccagagtcaaagaaagcagagaaggatttaactcttctgattgcaatggaaccactaatcaacgtgaagagaaacaaaggtttgatctttcctttggaaaactataaagaaggacagtcaactcaaatttatttaaaaaaaattgctgttcatgatacttgtttgaagacttgtggatattcagaggatattttccatttggcagcaaccttgtatgtctgtgtctgcactgctccccaggatgttcaacctgataaagaaattgttgtggacacgataatgttcctatggcagaaatgcaaattaggaattcagcggctcaatatatccagaaatgactatgcaaaattcacccagaaaatcagtactaacaaatggatttatcttctgtggcagataaatgaagtaattcactgctataaaatggaagacattgacattgtggtagtggcagaagtcacattacggttaagtgaaatattggaatctttaggaagcccaggaagaaaatttaaacaatctctagatgtacctttaagagaagggactaacaaattccctggagctccaaaagggatcacagaaattcttccaatattacagaaaaatcctgtggaacagttactttttgcttataaacttcttgacagagcaatcggtggaataaatttgaattgcatgttaacctctttgccaaatggatcatcagtaattgaccactgctatgccaagcgtacccaccatatagatggagatacttacaaaccacttgcctcaaatagtttcatgatggatttgcatcttgaactaattcaagctcagcatcgaatagctgttgtgcttctggacaaattgcaagttttgcagactccaactgttagcaaagatatttctaccaagggtccggaaaagttaaaacaatctggaagcactgattgttttacagaattaaatataatgaataaaataaagaagaatacattatccaaagcaatttacttaatgcagaaagctcttttaatattcgagaaagatgcaacttctacatcttcatgggaacttttgatggaagcatattccttaattcagaggattgaagctgaacaaaatgccctatattcctatcagaaatatttggaaagttcaaaaagaaagaaaagcagagtcccccctccacctatcctgctgtctcgaactcattgttctgtgacactcaaacctgctccatttacttcagaggttaaggtctcctggtactgcattttgggttgcaaagcagaaggaagttatggaaaagtacggctaaacaataatcatctcccaaattcaggagaagcgataccagctgacggtaaaagtgtttttgaagtgaaaggtttagaaaccaatgaaaagtatgtatttgcagttgctgcctattctaacaacggaaagcttgtcggtggtgctattggggagacaactaaaccaattctggtttatccccctctttctactattactgctcggatgttcctgacacaggttgcctatcaagttggtaactatgaattggctaagaaagttttctcaccagtttgggattattttgttgcttcgccacttcaggatgaacaatctgttatttgtttaagcaatataattactattacacaaagaagattacattcagatattttggcagagacttcttcaatcctcttgtacctttttcttagaaatatttttgtaacaagtgacatcaaaattaaagaagaaaatcttttctgtgataatattaaaggcaatgagattttcccatctcaacaaattgccagactgattgaatgtgagagagtattagtggcattggaacttagcaacttcctaaatgattccagctatgcccttcaagctgtgactcaatgttatggacttcttgctcccataatttatcacaatattgttttggtacctgttgtacagatcctgataaagtgtatagtggttttgcaaggactaccaagtattgtctgctcgaagaaacatactgcgagctttgaaagtatacaacacatgatagcttgttgtattttctacataacaaagattcttcgttcatggagggaatatgacctggcagtaatgattataaattatgggaaaaaaatgttggacatcacaccaggatgcaagtctctgtttgatggtagtaatgaacaagaagaaatgccagaggaggattcttctaagaagtctttaaagactaagaagccacagcagatactactgcctgaaaagataaatgaacagctggccttgttggagacacacctactcaaactgacaaagcaatatgttacatctgaactctcaggaggagaggaccctatatttctttatcctgtagttttgaattggtcggtcaaaggtgccgtgaaagaagttatgaaatttaagcaaaaaccaagatttctggaattctttacacaagttatgctaaaatgcatgaatgaggaaaaatttcatcttatggtagaggtaacaactcctgtccatgacttcttgaaaaggagaaatgagtctctacttggactaataaaagtgaaatataaggatagtgctttgaataaaaaagcaaacaaatctttaaagttcaaagctgcagtaatggaaattggaagaagtgcagaaatgcaacaaagaataagaagtaaaaaaaaggaaactctaagagatttcatttttaaaaatccggctatttctgaaatggtggcacatgaaagaaataggagaaccagtgttaggaaagcagcacaacgatacctgatggattacttgaatcctctaatattaagttatgttaaaagaaagaggttccatcgtctatcacttgaagagatgccctggagagctcagatgaacctgtatctagcaggtgcacactttaacctggttttacaaaagctatgggagtgtacgaagatgaaatttggcacatcacatatgatggtcagtttccgatcatgtgatcctaacatgttttcactgtataattcaggaacagtattaccaacaagaaaattgactgtagaaaattataaagcaatgcttgatttccttcttacagccaaaaaaagaaaggccaacttaccatcagatgctgaagaattttctacatttattaattccataatgagtgatgaaaatatgtccaagacacaaacagtttatgactcagactctcaatcaggttctagtgctaaagaaaaggaccgaggagcaaatttgtgtgtaatggatcattttatgaaaatctttttatactgcaggagagcaatggttcttgctcatcgtggtggctattggactctgcttcagaactgctgtcgggccttatggaactttactcaggaactacaaatacttcttaaacaggcagtggatcttgataaaacatttcctattagccaagatggtttcctctgcacctctgttttaccattctatttgggagcagaattacttattgacatgttaatacaactacaaaataccagttctattaagcctattgaagacaaaggagaattcagtgttccaagctgttatgggaatattaaaaatgacaacggtggttctagtcttacctttgagcatcctttggatgatgtaaatgtggttgatttgaaatggatccacgactttgtattaaaatctctggaagttttatatcaagtggaaaaatgggaaacactagtatctcttgccattcagttcaatacagtttcacatgagaggtatacagaacaagtgacaccacttctggtgtatgcacagcgccagcttctgctgagaatacagaagttcaagggcccagatattacccaacaaccttgtgcaaggtatgaggctgaatatggagagaagataacttgccgaaatttcattgggaagcagcttaagattaattcttcaaccattgaagcaacaagcaactgcacagatttgctaaaaatgcttatctcttcagaatacagccgagccaaagcgcttgtctgcgtgcccgtggacgtgacagacaccttgaggtgttttagagagacactggaaaaatccaaataccataacagatcaatccgacacagcagaaagttgctttcattatttcttgcacagacacaagatgttctccaagccagcaatcaaagaagtcttaaagttcaggcgttgcattcacttggaagtcttctcatcttcgcagaaaagaaaagggctgcttttaagtgttggtgtcaagctcttgatgacatattcagaaaaccagacgtgctacacacgtggaaagaatttggcccctcactcaccaatgtcaccaacagtcattcacctccgggtttcaaagactacagtgaggagtttctgtcaagagttggcatctgggggtgtttgcaaggagcagtcatatcagcaaagatagcacaatttattaagtcattgaatgttgaaaagaaaactgactgttgcattttgtctgcgttactctttcagggtttgcttagaacaacacttccacatcccaaagctgaacgttgctatgctcaatatgaaatcactcagcttctcccaggcattgaactcttctcagatagatacagggctgacatttgctctgtaattgcaagtctgtattacattatacgtgaactgcactttgttaggcaaaacctaatagttctgcctctccttgcattgtatcaatattttgtttctggaatttgtcaagacataacaagaaatctagaagcaagaatcctcaagatagaagtccttatagatttgagattcttttctgaagccttttatgagatatcccaaattttctatggaaaaaacatgccttgtccaatacctgcaggctataaagccactggaaaaatgaagatctttcaatcatttgactcaggaaaacttcttaccagtaaagaaaatatacaggcaattgatgaattaagaaataaaggcttgcctgcagttctggttacaattggccaaccacatctcttaaataagtttaattttgttaaagcatactttttcctaagtgtggctgcgacaataaattgtgtcccagaaaataaatttaagacagtaattaccaacaagagcaaaccaaacctaccaaacttggaagagatatattcaaaggatgatggaagttcattttataatcttacaaaacttaaagatgagatcactcttagcatgctaaagtcgatgttactgatggaagctgaggacaggctaaacttccttctgtccgaggtggaacagaagaccctgtctcagtgctccgctggcgagctggagattgtggtggaggcccggcttcagctggctgcagttgctctgcagaggcaccgggcggcatacagtgctgcaatagtattttctacacttacacttctccaggattcaaaactttttgaaaagaaggtagtacaggatgacacagagaatcctgtctctccaggaacttctgtcactgaaaataaagatgacagtgagtttttagatcctatttccctaaatgcccgagaatatttcaacattcatctgtggttgaggtgccgcttagcattggtgactgcatttgttgcacagattcatggcattggaattgtgaaagaggatgatatgacagattgcctgagcctcatcaatgaagtgtgtatggaggcaaaaagcgcaggggacacggaactgcaggctgaattcttgacgcaagctgtaattcttggcctacaagaaaagcatttaaaggcagacatcatgacaaaccttcaggatataatacatttgctggaaggaaatgaatttatttctcctcaatcacggctaaccctggcaagaagcctagttttgctggatgacttaaccaaagctgagaaattcaaggaatctccctcttcaaaaacaggaaaattaaatttgttaactcgggctcatagcattctaactgaacagatgctagcttttggagaaacaattgaatttcgttcatcaaacactaaatatgcaaatccattacagcctttgaaaaatatctatcttccccatgtcatgttattggccaaaataaaaatgagaattggacatacagtggccaagcaagtatattacaagaataaaaggaaggacccctcgaagtggttacctgctcttcatctgtttgatgtggcactgaagctctgtagaacaacagcagtggaggaacatgaggtggaagctgaaatcctttttcagaaaggcaaaatagaacgtcaaatactaatggaagagaaatctccaagttttcaacttgagagtttatatgaagctatacaactaagcctgaaaaatgatcaaaactcaggattgataagagactcctacctagaaatggctctattgtattttcatctgaagaagccaaagataaaaatttcaggatcaccattaacacttaagcctcctctcagaagaagtagttctgttaaagaaacatcagcaaataaatttgaaatgtacagttcattagcctggattgcaataagagctgctgcacaggtcagtgaagctgtgctggcaattaacttacttattggaaagaagaatactagaatgcataaagttaaccaagtggcattaccaaatatcccagaatttgctgctctggatcttttgtcttcgtatacagattatttgcttgacaactaccaagtcctcttccagacttcctgtacatttttgtaccaaaatgatgatgtgtgtgacagcgcagatggtagaaaaaagactcagaccaaagtggatattacatggatccttctactgcgctactatattcaccttcagaggattaataatctgagcaaactgctagcatctgcaacaccagtatctggaatttctttgccagatgatacacttctcacatccctttacaactctgagttgattttgcgccagaaagaagtgcattttttccttaaaaaattcttacagctgtattcttcttcttgtattgatgaatttccaaaagaacttctttgtcaactggaaaatccccctctttcagaaaaagacttacgtgaatcatctgccaagttgtatcgcgatagttctgtacaatccattttatcttttaagcctgtttcaggctcatcttgtgtggacataacgccaatagaaatggtaacgcaagcttcaaacaaagaactttgctttcaatggtacattcctcccctggatagacctcccaaggagacagaacctatggttttattgttgtatgcatataatttgaagcctctgaagatttcagatgttagacattccacttataacagtacatgtgttggctctttatggattccactgaatagggttattgcaattcatgagaaattatctaatcttgctcaaatagctgaactatcattgccagcagctcctgaaattacctcaaatgaaaacatatatgaagtagaagtggaagaggaatcagttgataatgaaatggaagacatgattattcaatgttgctctgaaatagcatctctgtttttgaatgataaagagccaacaccactatctgaggtcccatttgatatctcactgccgtctatattcaatcttgagagactttttgatctggctaatggttgcattttatcaggaggaagccttttcaactggatagtgtcaattattccctgaatatcctatacacgggatgataaaactgagaaataaatcaagagtatgacaacagactgaggaatttttcagcaatatctgtcagcctttggaaatttggtgagaagaagtagtcatgattcaatgtcttgcttgcacagaagcctctagttcaaacttggatcttgccccatctgatttcttatgatatatacaaatactctagatattgctttgagatttcgctgttgatcaactggcctgctgcagcttcataggtgtttcagctcccagtagggcagtttaactcctatcttctctgtgagttccaggtctgtatatctcctcagctcgctctcatttgtccagcttatctatttctttatcaagttgctttggcttccccactctctcctgcgttttgaaaagaattaattctcaagtagattaaaactacattctggtaaaaatga

SEQ ID NO: 141 - protein, 3096 aa, Homo sapiens
MAAQGSPSSSPSDDSTTSGSLPELPPTSTATSRSPPESKGSSRSSLLQWTCPEDSLPLAVFYGPLDAKNPLLASCEKEIQELLGFMRKKKALATTEEEKHEFRRRCATSLFNIWTKYAPRLPADYYNEKLLKVGDSLCQMKEYKLALLQCYGRYLQQFNTNFDENKVDVTQFKATFFPKGFKDKTAGLTFHALSGKNMCNYQLVCDSDENLKNKESVVQCLHILSSLRLIMQVALPQEHLCWIIFNGTIYIYTICRKLMVIGQSSKALEYLLWASMCMESLVPLLSLRYLTWRATLYTAVCQCCYDCHAGIHGEAFARRALAKIDELRQLELMSSSKSQEESRRYFREATMKMAVMIFKRGVFESRRKNKAVFRPKIRINLREVQTLSWPRTVTERLLDEMFDSTASQFLAVLEALSDSNRRILQTGPIVTDEVEIHDVVSELFMAGKELLIMSNIGADGMLDFPKTSLLELMIGRKDVISVDAAVKFIKLAFTYEEWSLFESSAVHLIYFLQRQDDPESKKAEKDLTLLIAMEPLINVKRNKGLIFPLENYKEGQSTQIYLKKIAVHDTCLKTCGYSEDIFHLAATLYVCVCTAPQDVQPDKEIVVDTIMFLWQKCKLGIQRLNISRNDYAKFTQKISTNKWIYLLWQINEVIHCYKMEDIDIVVVAEVTLRLSEILESLGSPGRKFKQSLDVPLREGTNKFPGAPKGITEILPILQKNPVEQLLFAYKLLDRAIGGINLNCMLTSLPNGSSVIDHCYAKRTHHIDGDTYKPLASNSFMMDLHLELIQAQHRIAVVLLDKLQVLQTPTVSKDISTKGPEKLKQSGSTDCFTELNIMNKIKKNTLSKAIYLMQKALLIFEKDATSTSSWELLMEAYSLIQRIEAEQNALYSYQKYLESSKRKKSRVPPPPILLSRTHCSVTLKPAPFTSEVKVSWYCILGCKAEGSYGKVRLNNNHLPNSGEAIPADGKSVFEVKGLETNEKYVFAVAAYSNNGKLVGGAIGETTKPILVYPPLSTITARMFLTQVAYQVGNYELAKKVFSPVWDYFVASPLQDEQSVICLSNIITITQRRLHSDILAETSSILLYLFLRNIFVTSDIKIKEENLFCDNIKGNEIFPSQQIARLIECERVLVALELSNFLNDSSYALQAVTQCYGLLAPIIYHNIVLVPVVQILIKCIVVLQGLPSIVCSKKHTASFESIQHMIACCIFYITKILRSWREYDLAVMIINYGKKMLDITPGCKSLFDGSNEQEEMPEEDSSKKSLKTKKPQQILLPEKINEQLALLETHLLKLTKQYVTSELSGGEDPIFLYPVVLNWSVKGAVKEVMKFKQKPRFLEFFTQVMLKCMNEEKFHLMVEVTTPVHDFLKRRNESLLGLIKVKYKDSALNKKANKSLKFKAAVMEIGRSAEMQQRIRSKKKETLRDFIFKNPAISEMVAHERNRRTSVRKAAQRYLMDYLNPLILSYVKRKRFHRLSLEEMPWRAQMNLYLAGAHFNLVLQKLWECTKMKFGTSHMMVSFRSCDPNMFSLYNSGTVLPTRKLTVENYKAMLDFLLTAKKRKANLPSDAEEFSTFINSIMSDENMSKTQTVYDSDSQSGSSAKEKDRGANLCVMDHFMKIFLYCRRAMVLAHRGGYWTLLQNCCRALWNFTQELQILLKQAVDLDKTFPISQDGFLCTSVLPFYLGAELLIDMLIQLQNTSSIKPIEDKGEFSVPSCYGNIKNDNGGSSLTFEHPLDDVNVVDLKWIHDFVLKSLEVLYQVEKWETLVSLAIQFNTVSHERYTEQVTPLLVYAQRQLLLRIQKFKGPDITQQPCARYEAEYGEKITCRNFIGKQLKINSSTIEATSNCTDLLKMLISSEYSRAKALVCVPVDVTDTLRCFRETLEKSKYHNRSIRHSRKLLSLFLAQTQDVLQASNQRSLKVQALHSLGSLLIFAEKKRAAFKCWCQALDDIFRKPDVLHTWKEFGPSLTNVTNSHSPPGFKDYSEEFLSRVGIWGCLQGAVISAKIAQFIKSLNVEKKTDCCILSALLFQGLLRTTLPHPKAERCYAQYEITQLLPGIELFSDRYRADICSVIASLYYIIRELHFVRQNLIVLPLLALYQYFVSGICQDITRNLEARILKIEVLIDLRFFSEAFYEISQIFYGKNMPCPIPAGYKATGKMKIFQSFDSGKLLTSKENIQAIDELRNKGLPAVLVTIGQPHLLNKFNFVKAYFFLSVAATINCVPENKFKTVITNKSKPNLPNLEEIYSKDDGSSFYNLTKLKDEITLSMLKSMLLMEAEDRLNFLLSEVEQKTLSQCSAGELEIVVEARLQLAAVALQRHRAAYSAAIVFSTLTLLQDSKLFEKKVVQDDTENPVSPGTSVTENKDDSEFLDPISLNAREYFNIHLWLRCRLALVTAFVAQIHGIGIVKEDDMTDCLSLINEVCMEAKSAGDTELQAEFLTQAVILGLQEKHLKADIMTNLQDIIHLLEGNEFISPQSRLTLARSLVLLDDLTKAEKFKESPSSKTGKLNLLTRAHSILTEQMLAFGETIEFRSSNTKYANPLQPLKNIYLPHVMLLAKIKMRIGHTVAKQVYYKNKRKDPSKWLPALHLFDVALKLCRTTAVEEHEVEAEILFQKGKIERQILMEEKSPSFQLESLYEAIQLSLKNDQNSGLIRDSYLEMALLYFHLKKPKIKISGSPLTLKPPLRRSSSVKETSANKFEMYSSLAWIAIRAAAQVSEAVLAINLLIGKKNTRMHKVNQVALPNIPEFAALDLLSSYTDYLLDNYQVLFQTSCTFLYQNDDVCDSADGRKKTQTKVDITWILLLRYYIHLQRINNLSKLLASATPVSGISLPDDTLLTSLYNSELILRQKEVHFFLKKFLQLYSSSCIDEFPKELLCQLENPPLSEKDLRESSAKLYRDSSVQSILSFKPVSGSSCVDITPIEMVTQASNKELCFQWYIPPLDRPPKETEPMVLLLYAYNLKPLKISDVRHSTYNSTCVGSLWIPLNRVIAIHEKLSNLAQIAELSLPAAPEITSNENIYEVEVEEESVDNEMEDMIIQCCSEIASLFLNDKEPTPLSEVPFDISLPSIFNLERLFDLANGCILSGGSLFNWIVSIIP

SEQ ID NO: 142 - DNA, 2167 bp, Homo sapiens
  source 1..2167: mol_type = other DNA
tccctgtcctgcgcccgcgcgccccgggagcctacccagcacgcgctccgcgcccactggttccctccagccgccgccgtccagccgagtccccactccggagtcgccgctgccgcggggacatggtcctctgcgttcaggggtgagcacccccttgtaagctcagggctactgttgggtgtcagggaacaaagttttagactgctgcgctccaaagcgggcacacacatgtacctagaacacaccagccactgtccccaccatgatgatgacacagccatggacacacccctgcccagacctcgtcctttgctggctgtggagcggactgggcagcggcccctgtgggccccgtccctggaactgcccaagccagtcatgcagcccttgcctgctggggccttcctcgaggaggtggcagagggtaccccagcccagacagagagtgagccaaaggtgctggacccagaggaggatctgctgtgcatagccaagaccttctcctaccttcgggaatctggctggtattggggttccattacggccagcgaggcccgacaacacctgcagaagatgccagaaggcacgttcttagtacgtgacagcacgcaccccagctacctgttcacgctgtcagtgaaaaccactcgtggccccaccaatgtacgcattgagtatgccgactccagcttccgtctggactccaactgcttgtccaggccacgcatcctggcctttccggatgtggtcagccttgtgcagcactatgtggcctcctgcactgctgatacccgaagcgacagccccgatcctgctcccaccccggccctgcctatgcctaaggaggatgcgcctagtgacccagcactgcctgctcctccaccagccactgctgtacacctaaaactggtgcagccctttgtacgcagaagcagtgcccgcagcctgcaacacctgtgccgccttgtcatcaaccgtctggtggccgacgtggactgcctgccactgccccggcgcatggccgactacctccgacagtaccccttccagctctgactgtacggggcaatctgcccaccctcacccagtcgcaccctggaggggacatcagccccagctggacttgggcccccactgtccctcctccaggcatcctggtgcctgcatacctctggcagctggcccaggaagagccagcaagagcaaggcatgggagaggggaggtgtcacacaacttggaggtaaatgcccccaggccgcatgtggcttcattatactgagccatgtgtcagaggatggggagacaggcaggaccttgtctcacctgtgggctgggcccagacctccactcgcttgcctgccctggccacctgaactgtatgggcactctcagccctggtttttcaatccccagggtcgggtaggacccctactggcagccagcctctgtttctgggaggatgacatgcagaggaactgagatcgacagtgactagtgaccccttgttgaggggtaagccaggctaggggactgcacaattatacactatttatttatttattctccttggggttggtgtcaggggcgagccaaccccacctctatgccctgagccctggtagtccagagaccccaactctgccctggcttctctggttcttccctgtggaaagcccatcctgagacatcttgctggaaccaaggcaatcctggatgtcctggtactgacccacccgtctgtgaatgtgtccactctcttctgcccccagccatatttggggaggatggacaactacaataggtaagaaaatgcagccggagcctcagtccccagcagagcctgtgtctcaccccctcacaggacagagctgtatctgcatagagctggtctcactgtggcgcaggccccggggggagtgcctgtgctgtcaggaagagggggtgctggtttgagggccgccactgcagttctgctaggtctgcttcctgcccaggaaggtgcctgcacatgagaggagagaaatacacgtctgataagacttcatgaaataataattatagcaaagaacagtttggtggtcttttctcttccactgatttttctgtaatgacattatacctttattacctctttattttattacctctataataaaatgatacctt

SEQ ID NO: 143 - protein, 275 aa, Homo sapiens
MYLEHTSHCPHHDDDTAMDTPLPRPRPLLAVERTGQRPLWAPSLELPKPVMQPLPAGAFLEEVAEGTPAQTESEPKVLDPEEDLLCIAKTFSYLRESGWYWGSITASEARQHLQKMPEGTFLVRDSTHPSYLFTLSVKTTRGPTNVRIEYADSSFRLDSNCLSRPRILAFPDVVSLVQHYVASCTADTRSDSPDPAPTPALPMPKEDAPSDPALPAPPPATAVHLKLVQPFVRRSSARSLQHLCRLVINRLVADVDCLPLPRRMADYLRQYPFQL

SEQ ID NO: 144 - DNA, 1009 bp, Homo sapiens
  source 1..1009: mol_type = other DNA
atcccctgcactcggttcctctgtaacttagactccagtgtgccgcgcagtgtgcgcaaattcacaaacccgcccgctgagttggtcgtttcggaatcccgagacttgaaacccaacgggaagacccttctcaccctcaaaagaagatgacagcccgcagagagttaacttctgtttacatggaactcagacatctgcaaatcatgcttgcggaaggagctaatgctgcttatttgcagttgttgaacctgtttgcctatgggacatacccagattacatagccaacaaggagagcctgccagaactgagcacagctcagcagaacaagctgaagcatcttaccatcgtgagcttggcatcaagaatgaagtgtatcccctactccgtgttgctgaaagacctggagatgcggaatctccgggaactagaagaccttatcattgaggctgtctacactgacatcatccagggcaagctggaccagcgaaaccagctgctggaagtggatttctgcattggccgtgacatccgaaagaaggatatcaataatattgtcaagaccctgcatgaatggtgtgatggctgtgaagcagttctactgggcatcgagcagcaagttctgagagccaaccagtacaaagagaaccacaaccgaactcagcagcaggtagaagcagaggttaccaacatcaagaagacactcaaagccaccgcatcctcctcggctcaggagatggagcagcagctggctgaacgggagtgtccccctcacgctgagcagaggcagcccaccaagaagatgtccaaagtgaaaggtctggtctccagccgccactagggccggctggggcagctggcactcaccaggcctgggtcaggtggggaggggacaccaagggcccatttcctcccctctctacctgcagtgagttccagacctgcccgtcccctcaccagcgcctccccaccctgttggtactgttccagaaaaactgttactccccctca

SEQ ID NO: 145 - protein, 264 aa, Homo sapiens
MAGEQKPSSNLLEQFILLAKGTSGSALTALISQVLEAPGVYVFGELLELANVQELAEGANAAYLQLLNLFAYGTYPDYIANKESLPELSTAQQNKLKHLTIVSLASRMKCIPYSVLLKDLEMRNLRELEDLIIEAVYTDIIQGKLDQRNQLLEVDFCIGRDIRKKDINNIVKTLHEWCDGCEAVLLGIEQQVLRANQYKENHNRTQQQVEAEVTNIKKTLKATASSSAQEMEQQLAERECPPHAEQRQPTKKMSKVKGLVSSRH

SEQ ID NO: 146 - DNA, 647 bp, Homo sapiens
  source 1..647: mol_type = other DNA
gctatattgggcccacctgcctgggttccagcagcttccgcagccccagcaggagacggaagatgcaagaggtcattgcggggctagagcggttcacctttgccttcgagaaggatgtcgagatgcagaagggcactgggctcctgcctttccagggcatggacaagtcggcctcagctgtgtgcaacttcttcactaaagggctctgtgagaaagggaaactctgccccttccgacatgaccgaggggagaagatggtggtatgcaagcactggctccgggggctctgcaagaagggtgatcactgcaagttcctgcaccagtatgacctcaccaggatgcctgagtgctacttctactccaagtttggtgactgcagcaacaaggagtgttccttcctccatgtgaagccagctttcaagtcccaggactgtccttggtatgaccaaggtttctgcaaggacggtcctctgtgtaaataccgccatgtccccagaataatgtgtctcaactatttagttggcttctgccccgagggacccaagtgccaatttgctcagaagattcgggaattcaagctgctgcctggaagcaagatctaagcgttgcttcttacctagcggggcactccaatgccacagacaggg

SEQ ID NO: 147 - protein, 179 aa, Homo sapiens
MQEVIAGLERFTFAFEKDVEMQKGTGLLPFQGMDKSASAVCNFFTKGLCEKGKLCPFRHDRGEKMVVCKHWLRGLCKKGDHCKFLHQYDLTRMPECYFYSKFGDCSNKECSFLHVKPAFKSQDCPWYDQGFCKDGPLCKYRHVPRIMCLNYLVGFCPEGPKCQFAQKIREFKLLPGSKI

SEQ ID NO: 148 - DNA, 6171 bp, Homo sapiens
  source 1..6171: mol_type = other DNA
gcgcgtccccgccctcgcgtcacgtgacgtggccgcggaacctgagctgcggggcctaagccgagctaaattcgttgcaggtggccgcggcgggtgcaaccacaaaggctaatccgaaggagtcggggaggctcgtggagtcgatgcttcctcttccaagtcaggtcggctcccgttaccttctcagcattcgccgttccggtcttcctgagcgcgtgcatgaggtctttcgcgtggggaagctccggtgaccatgtaggggagaagagtgaggaagctcctggtgcttgggacgaggtcagcgctgtcggcgcgctgctccagcgcccaccacaccctggtgcgggccgacgggccctgggccctggtgggagctccggcctccggtcaaggcctggccgggagcgccacgaattctcgcgtcgtctcgcgagagtccaagttaaagaacatggcgacgtctaatctgttaaagaataaaggttctcttcagtttgaagacaaatgggattttatgcgcccgattgttttgaagcttttacgccaggaatctgttacaaaacagcagtggtttgatctgttttcggatgtgcatgcagtctgtctttgggatgataaaggcccagcaaaaattcatcaggctttaaaagaagatattcttgagtttattaagcaagcacaggcacgagtactgagccatcaagatgatacggctttgctaaaagcatatattgttgaatggcgaaagttctttacacaatgtgatattttaccaaaacctttttgtcaactagagattactttaatgggtaaacagggcagcaataaaaaatcaaatgtggaagacagtattgttcgaaagcttatgcttgatacatggaatgagtcaatcttttcaaacataaaaaacagactccaagatagtgcaatgaagctggtacatgctgagagattgggagaagcttttgattctcagctggttattggagtaagagaatcctatgttaacctttgttctaatcctgaggataaacttcaaatttatagggacaattttgagaaggcatacttggattcaacagagagattttatagaacacaagcaccctcgtatttacaacaaaatggtgtacagaattatatgaaatatgcagatgctaaattaaaagaagaagaaaaacgagcactacgttatttagaaacaagacgagaatgtaactccgttgaagcactcatggaatgctgtgtaaatgccctggtgacatcatttaaagagactatcttagctgagtgccaaggcatgatcaagagaaatgaaactgaaaaattacatttaatgttttcattgatggacaaagttcctaatggtatagagccaatgttgaaagacttggaggaacatatcattagtgctggcctggcagatatggtagcagctgctgaaactattactactgactctgagaaatacgttgagcagttacttacactatttaatagatttagtaaactcgtcaaagaagcttttcaagatgatccacgatttcttactgcaagagataaggcgtataaagcagttgttaatgatgctaccatatttaaacttgaattacctttgaagcagaagggggtgggattaaaaactcagcctgaatcaaaatgccctgagctgcttgccaattactgtgacatgttgctaagaaaaacaccattaagcaaaaaactaacctctgaagagattgaagcaaagcttaaagaagtgctcttggtacttaagtatgtacagaacaaagatgtttttatgaggtatcataaagctcatttgacacgacgtcttatattagacatctctgccgatagtgaaattgaagaaaacatggtagagtggctaagagaagttggtatgccagcggattatgtaaacaagcttgctagaatgtttcaggacataaaagtatctgaagatttgaaccaagcttttaaggaaatgcacaaaaataataaattggcattaccagctgattcagttaatataaaaattctgaatgctggcgcctggtcaagaagttctgagaaagtctttgtctcacttcctactgaactggaggacttgataccggaagtagaagaattctacaaaaaaaatcatagtggtagaaaattacattggcatcatctcatgtcaaatggaattataacatttaagaatgaagttggtcaatatgatttggaggtaaccacgtttcagctcgctgtattgtttgcatggaaccaaagacccagagagaaaatcagctttgaaaatcttaagcttgcaactgaactccctgatgctgaacttaggaggactttatggtctttagtagctttcccaaaactcaaacggcaagttttgttgtatgaacctcaagtcaactcacccaaagactttacagaaggtaccctcttctcagtgaaccaggagttcagtttaataaaaaatgcaaaggttcagaaaaggggtaaaatcaacttgattggacgtttgcagctcactacagaaaggatgagagaagaagagaatgaaggaatagttcaactacgaatactaagaacccaggaagctatcatacaaataatgaaaatgagaaagaaaattagtaatgctcagctgcagactgaattagtagaaattttgaaaaacatgttcttgccacaaaagaaaatgataaaagagcaaatagagtggctaatagagcacaaatacatcagaagagatgaatctgatatcaacactttcatatatatggcataattttgaatatcatggacaatatttagaacccaaattttggagtgcttgggcagaaagttgtaaagtttgtgctggagaaaggtttatttggactttgattacataaatattaaaatctctgccttaccttacaaaaacaactatattttgccaatcacattagttagcatgatggcattcccttcatgttgcacactctttgacagcatgctgttttgtggagaaacttgcattcatgaagagcccattatcaacttttaaaagtgaatttgatttgtacccaccaggagaaatacagttgggaagggtgagggtggggttcttgttgcttttttctcttttttcctctcttaaaaaatgtacttgcacaaggaaggatcttcagatattcatgcactgaaaaatgctgttatcttttgtttttaaaaaatgcaattaaaactagaaatagcactcttggtttcttttgatgaaaagagtgagctggtcaatgcaacattgggaaacggcagatgtaggtgagaagttaagtatttaatagtatcaaattgttcaaacattgctcagtataataactggattttaatggtgacctaaaaatggtattaaatattttcaactttcaaatgttggttttctttaagcaggagactgctattttagttgttgttaaatgatgaggagtttttttttttttaaatatggctggaaagcttgttttgaaaaatgaagcttatattaattgttgcttcaatagtttaaaaaatttatggagataggtaggtcattatgattgcagagccaaaatagcaaaacaaacatattaagtgtgtttactaaacatattgtgtgtttactaacacacttaatgtttatatacctaatatttattatgccatatctgaatttattaaaaacaacacagaaatctcctgctctgatatagttatgtaactgatctcttaatctgtagcatagaagtattttggtattttaaggtctcatgattagggatttgtagcctcaggtttgaatcagtcacctaggggtaagagaaaaaccacaacataagacctgaaaaacagaagcaaaattgttgcactcttaatacgagcagtaaacttgccaaatatatgtacatatatatttatatattttaaaaataaacattttttaaatcgtcagaaggcaacatttaccatgttcctttcagtctatccaaagtagcaacttaactagttgctggcaactgaatacccagagtagtggaaattttaggacttgaggacgtgaacaacttgaaagagaaaattgattccccttgaggaaagaatggctcaacgtggatttttattcattgtggtgcacgtttcaaattttcttgcaaattattttatatcttatttgatgttaagtaatatttttaaagtatggtttttgaagatagtaggaaatggagtacagaaaggcatacagtattatgttacagtggagtgctttcaagagcatttcgtaggatctgtccccatccgaagaggctttgtgaactgcctgctgaatggaaggaaagcaactttaaaacatttagagttttgctgagtatagccaaatgcctgttctgaaacttataggaaattggaattttgtttaaaattttacactttaaggtagcaaatgtcaattattagaccgagcatattgtgaagaattaaactaaaattaatacgtacagttttctctaattaggtgactgttcataatgggtatatttggaatttagaagaaataattttgtagtaattgtggcccttatgtttaacagataattcagcattggcgtatttgcttgtcccaatacaagaatgccaaaggaggaaacaggaaaaattgccgtccattttaaaaatttaggtttgttgttttaaaccataattgttctcagaacttttttggaacttctaattttgggtcatttaatttaagaatgagagtcatgatgttttgatttatgaaggtgaatttaatgcaaaagtgggtaacactacattcatagcaaagttttttattaaattttataaatttttaatagccaattatgtcctaattgtattttggggaatgaacagcagcaaatactgtaaatgtacagttttcttttttttttttttttggttatgtatacaaaagttttaactactttttggtgtttatgaaaatcatttagttgacaaggtgcctatgccattgttaaattttctttaagtaatttaacaacagatttgctaatttaaaaaaaaatgaaaaaaaaaatcttaccagcagtttgtaaaggtctggaatcacagttggcatcctttattcaggtctcttctctccagcgtacacttaaaattggtgccgagcagggatataacctgcagttaagtgaaaagaaaatccagcctccccctccaaaaaaaaaaaaaaaatttaatttttaaaaattagtggtatggcaataagacacttcagaggctatcttaacctctgaatacccatcttctagtttaaagacagagacatcccatctggaaaatgttaacttgtgttgccatctcgttgccggagtaagtagacataagacagagtttaagaagtaaaaatatagaaaaattttgatggtcacaatgagataaatattagaatattactattccaatgattaaatgaggatcttgaaataaattctgaagtcttccaatttttacatttattggaggggtccctgagttctgtcaacttttttatttaagtctcttgctcttattttgtgcataaatgttaaaccttccaaaaatgaaatgttagctttctttcttttactttttattaaatttaatagaaaatatgacctgagtagttaaaaagtattttgcattatttgcagtaagatgtctctagcactgctcaaagggcaaattttaaaacttcagtctgggtgaaagatttgctagttttacagaaagatttgctatcttaaactcaagctggtttttctgttctcatgtaagtgactgggatgctgtcttatgaattcttccaaggtcatgtttgtgaaataaacattacatgagagctttcctgtcatctacactatatgttgtctggagtgttgaacaaatttattttagtttctaagttgtaatctatcctcatatggtctatacgattttgaatgtgtgccactacatactgagatgataatgctgtacaattttaagtggtagcagtttctgtatgcagtaggctgaaatattttgatgaactgcttaatttttggattttattttttaagttgtataatttattttcttgcaaaataaaaatgtaatataaaa

SEQ ID NO: 149 - protein, 780 aa, Homo sapiens
MATSNLLKNKGSLQFEDKWDFMRPIVLKLLRQESVTKQQWFDLFSDVHAVCLWDDKGPAKIHQALKEDILEFIKQAQARVLSHQDDTALLKAYIVEWRKFFTQCDILPKPFCQLEITLMGKQGSNKKSNVEDSIVRKLMLDTWNESIFSNIKNRLQDSAMKLVHAERLGEAFDSQLVIGVRESYVNLCSNPEDKLQIYRDNFEKAYLDSTERFYRTQAPSYLQQNGVQNYMKYADAKLKEEEKRALRYLETRRECNSVEALMECCVNALVTSFKETILAECQGMIKRNETEKLHLMFSLMDKVPNGIEPMLKDLEEHIISAGLADMVAAAETITTDSEKYVEQLLTLFNRFSKLVKEAFQDDPRFLTARDKAYKAVVNDATIFKLELPLKQKGVGLKTQPESKCPELLANYCDMLLRKTPLSKKLTSEEIEAKLKEVLLVLKYVQNKDVFMRYHKAHLTRRLILDISADSEIEENMVEWLREVGMPADYVNKLARMFQDIKVSEDLNQAFKEMHKNNKLALPADSVNIKILNAGAWSRSSEKVFVSLPTELEDLIPEVEEFYKKNHSGRKLHWHHLMSNGIITFKNEVGQYDLEVTTFQLAVLFAWNQRPREKISFENLKLATELPDAELRRTLWSLVAFPKLKRQVLLYEPQVNSPKDFTEGTLFSVNQEFSLIKNAKVQKRGKINLIGRLQLTTERMREEENEGIVQLRILRTQEAIIQIMKMRKKISNAQLQTELVEILKNMFLPQKKMIKEQIEWLIEHKYIRRDESDINTFIYMA

SEQ ID NO: 150 - DNA, 937 bp, Homo sapiens
  source 1..937: mol_type = other DNA
cagccagcaagtggcagtttcgggttcacacggaaacgggcgtgccatttccgcgcacgtctgcagatgcggtagtcgattggtcaagtctcccatggctcctccttcatcaggaggtgggcaaaccgcgccatgatagggtcgggattggctggctctggaggcgcaggtggtccttcttctactgtcacatggtgcgcgctgttttctaatcacgtggctgccacccaggcctctctgctcctgtcttttgtttggatgccggcgctgctgcctgtggcctcccgccttttgttgctaccccgagtcttgctgaccatggcctctggaagccctccgacccagccctcgccggcctcggattccggctctggctacgttccgggctcggtctctgcagcctttgttacttgccccaacgagaaggtcgccaaggagatcgccagggccgtggtggagaagcgcctagcagcctgcgtcaacctcatccctcagattacatccatctatgagtggaaagggaagatcgaggaagacagtgaggtgctgatgatgattaaaacccaaagttccttggtcccagctttgacagattttgttcgttctgtgcacccttacgaagtggccgaggtaattgcattgcctgtggaacaggggaactttccgtacctgcagtgggtgcgccaggtcacagagtcagtttctgactctatcacagtcctgccatgatgagccctgttcctgctcatcatgaagatccccgcgatacttcaacgccttctgacttccaggtgatgactgggcccccaataaatcccgtctttgggtctctctgccttttgcctgttttttgtcatgtatgcaaatttgttgggagaatataagtgcttctagtccctgtattctctacatctttcagaatgactcagagctgcta

SEQ ID NO: 151 - protein, 156 aa, Homo sapiens
MPALLPVASRLLLLPRVLLTMASGSPPTQPSPASDSGSGYVPGSVSAAFVTCPNEKVAKEIARAVVEKRLAACVNLIPQITSIYEWKGKIEEDSEVLMMIKTQSSLVPALTDFVRSVHPYEVAEVIALPVEQGNFPYLQWVRQVTESVSDSITVLP

SEQ ID NO: 152 - DNA, 6136 bp, Homo sapiens
  source 1..6136: mol_type = other DNA
agatgaagaggaggcggtggcagtggtggaagaagaggcggcggcggcgggggtagggagcctggaaacgcgagcggggatggtaggtggtttggacccgccgggccgccgtcgtttccagaaagggtttgactggaggaacctctggagcagctgttggctggctcctctggctgatggcatgttgaggtacatgggccagcggcagcgagggcatccaatccagaggggtccactctagaggccaggccaccagcaccatgggccagtgtgtcaccaagtgtaagaatccctcatcgaccctgggcagcaaaaatggagaccgtgagcccagcaacaagtcacatagcaggaggggtgcaggccaccgtgaggagcaggtaccaccctgtggcaagccaggtggagatatcctcgtcaacgggaccaagaaggccgaggctgccactgaggcctgccagctgccaacgtcctcgggagatgctgggagggagtccaagtccaatgccgaggagtcttccttgcaaagattggaagaactgttcaggcgctacaaggatgagcgggaagatgcaattttggaggaaggcatggagcgcttttgcaatgacctgtgtgttgaccccacagaatttcgagtgctgctcttggcttggaagttccaggctgcaaccatgtgcaaattcaccaggaaggagttttttgatggctgcaaagcaataagtgcagacagcattgacggaatctgtgcacggttccctagcctcttaacagaagccaaacaagaggataaattcaaggatctctaccggtttacatttcagtttggcctggactctgaagaagggcagcggtcactgcatcgggaaatagccattgccctgtggaaactagtctttacccagaacaatcctccggtattggaccaatggctaaacttcctaacagagaacccctcggggatcaagggcatctcccgggacacttggaacatgttccttaacttcactcaggtgattggccctgacctcagcaactacagtgaagatgaggcctggccaagtctctttgacacctttgtggagtgggaaatggagcgaaggaaaagagaaggggaagggagaggtgcactcagctcagggcctgagggcttgtgtcccgaggagcagacttagtggctctgtcccaggagcagcagcaaggatctgccagctgccctgcagccaactgaggaattggaccattttggaaattactgaagatccggatattttctactttacacctttctctgccttgtatctgaaagggctctaaaatgctgtatcatgttttaggcactttcttcatttttttggttattttggttatttcctttttggggggatctcccagaatatttgaacctggttacatgttgtgtatctttttttgaagccttcagatagaataagcctgccatttcttgcacaaatttaggttttttttttgtttttttttgtttttttttttttttttttggtaggggagggcatagagcagggcggggggatgggactgttaggttgaattaacattacaaaatgatacagtgccagatctcagtttcgcatattgtttttcagggcaggtctgtactgtgtgtagtgctgtttacatagatgaatttaggttgtaataattatttttaaagatttacacagatttgaatagcagtgttaactgttaaccacattgcattaattcccaggcgatttagagctcttggagagccaaggccagccaagagcatttgtagtctggtgacaacccccttttaagctaatttatccagaaccctgatttccctcacttcttgctcattccttctttgacctattgcatttcatgttgagtttttccatcaacatgctgcacctgtcagtcaagtgagcattttttaagaacacattgtactgagaaccacttaagcattgaatgcggagaaagcagtgctacctcagttttgctggaagtagacttctttgatagttttctttctttgatgaagtttctgtattttcatgttgtaagtggaaatacttttttttgtttgtttgtttcatttgccttggagccaaagtttctgttcctggtggtcgggaaactgcctgccggccaactgacttgaaggaaaactgtggtatggagctctgcttgaatttttttttttttaatatttttatttttttctttgaatatcatcagcttacttgtctggcaagggcagaagcctggggttggcctgaactctgccaaacaaatatcaaagtgtatttaatagttaaatttgtgccctttcccttcttgctgcacccatgttgtcacttaacccccaggagttatttattatctttttgttaaagtcaggctcatttggggtaatgtgatgactgtttaggtttacatgaccctcctctcctttccctacccccaaatatgtatatatacatatataaaatatgtatatattttacctatataaaatatatatatatacacatatatgtatctatattcctttgtttctttgcctgcttatactggccataaaagagggagctgccttcaatgtataaagtataagaagagtgccagggaatgccataatggaggcttttggatctgaatttggaccatttcactaaagagaacatgagtttgctcagccctttcctcacaagagggagggccccggttccccagacttctccacgcgctggctccataaaggccagctttggccaggctgccacaggggcctgaggagctcactctgggcctacctggtttcagttagagggtcctcctgttatttttccatttaaaaagtatgtcctcagaaaactgtactggaaggatgggtggcaggaacttgtatagttcagcttccaacactttggaacagattaaaaagggaatcttttaaataaaaacgtataaaaatatttatactcttgaggtaatgagactttgtctgttaaacatttggaggtttctcccttaacctaataccccgctgcgtcccaggtatgtttctcagcctgggcaggaattgcatgttttgagttccattgtgagcagccttacagctctgggctcccatcttaaggattattaaagagttttggcagttggtatttttctaaaactgatattgaccatagggaacatacttggaatttgtttttttttttaaatcctaaacctgacagttcctccttcagaggggcaaatgggaaactttaagatcacccacggtatagtactgctagaaagctgaagggggtcttgggccagatgcctggcttctgttctagctaaataagactcttgaataagtctccaggggtcccagcaggttctgtgggatcagttgtagctgggtacccagactgaggttttaaaaagactgctttttcattaagccagtttgcaactcattttccccggttctggattgggtagtggttgactgagggaaaagccaggctgctcttggccagataaggccctttccatcccagatcagagtgtatcagagaaagctgcacaaaagaggcaggcagcccaggaccctgagtactctggagaaactaggttccttccccaccctttaagaagacattccgtgcattagatgtactagagtggatgtattttgttgttttttaaattaactatttagcctcctcatcccccaccaaaaaagccatttagttattttttggttatattgatccatttgcaaatgagaagccagaaaagggagcagtcagggagggacttacaagttcctttcaagtttgagtacttgatgctcagcaaagatttcaagcttctgcagtagctctgggccaatgcttgactctttcatgaccacaagaaatgcagtttttctgcaaagggatccaaggtgaggtgtgtgtagggtttgaagttatacttctgggaagtgaaaagtcttgttcctttcaacctagaaataggtttgccacttaatgagtgagcagtaagtctgtgtaagaggctgaatgcatgcccctcagataagccagtacactccttgcttagcaacagaacatcagggtgatgtggagaggggcaggatgtggacgccactttggaaatcggcaacatctgagggcaacaacaaacaagtgtgttgggaaataagaaataactcagttttgacaactggctttgtcagcttttgtgatgtttctttagcagtttattggaaagatggtatgagatgacgtgctgcttcattgaattgctctttcccccatctttgccaaatctcaatgtatcgttcttaaccccacctcctgtaaggggctttgctatgcttcagctggttgtctcagcagctgaagtgctgcccacctgtgtgagttgggtccaggaaaccatgtctgcccttctgataagggaagatgaatctagagctgggtgaagatctaaattttaaccaaacccctgggcccaggaaaataacaattgaaaatgtacaaggcagtgttttcaatattaaacttccccaaggaaagcacaaactagtctttttggaaagggagaaaggattaagccacacagtattagtctttgaagcagtactggtctctaggggctggtgccaaaatggagtcccatagtagttacactcgatggcctcatgtactatatactgtgccaaattgtattaaacagtggtggggagttactgggataagaacttgtctaaaagtttacaaaccaaaacagatctgttaggttggtgcaaaagtaagtttttgccatacttaatgtattgccattaagtatggcaaaaaccacaattacttttacaccaacctatgtatttaagaatgtttggtttgccagattccaaatgaggtcttcagtgcagcaaagcccaaaaggtgtagactcagttatgcaattataaggttaaggcgtagaagaaagctgctgctaggtttttgttgcattttacttgactgctctgctgtttttcttgtctctcatgtttggttagctatgacttgagcatcttggtaactgacaaaggtcttccttgggggacttgaacatcttggtaaatgacaggtcttcttggaggactccagcagtatcttgtttaaacgactgaaaggactattaaggttgttgaattgtgttaattgggactcattgaggaaatgcgacattgatcctcctcttattccacagtgtgttttctgatcatataaagaaggttccgaaccatccatccccctcagagtttattcccctggtaagctgtaattgcatatccagtttaaactggactgggactgcatgttggtgaggatcggcaggggttttcccccttttcgaaagatgaaatagattcttgagcactggttgcagaagccaaaatagttcaaatagctttgcataaccattgggttctgcttctgattcaggtgctgggcatcatgtcctccctattcttctcttcttggaaacccagcctatctcataaatacctacttccgccacccatccaacctccctgctcctttcaacacaaatcttggatattgccaaaggaagccattcagcagctgctggggtttttcatccccctgacatgcatacatttgctctgggagaagtgtcttccctctgaccctggtccccagctccgtctgtgcttaattgctcttacctgttgcactaatgaatatgactaggttttaaagggggaatgtgaagcaataggcacatggggcttggatgaattggtcccacagatataccctgccttaagccgctgaggtgatgagtccactgctcatgtgaccctccacctttgtggatccctcttggtttgtgaccagtgtgtctgtttgttgaggttgtacaaacttgacaaaagttaatacttttgtttgtattttctgcactgttgcactctccaaatggccccttgagtatttttattgacttgttacacacatttttgtctttgatgtctacattttttcctttaatgttttttatttggaaggttacctgctgttggatttaataaatttgtttacttgaa

SEQ ID NO: 153 - protein, 304 aa, Homo sapiens
MGQCVTKCKNPSSTLGSKNGDREPSNKSHSRRGAGHREEQVPPCGKPGGDILVNGTKKAEAATEACQLPTSSGDAGRESKSNAEESSLQRLEELFRRYKDEREDAILEEGMERFCNDLCVDPTEFRVLLLAWKFQAATMCKFTRKEFFDGCKAISADSIDGICARFPSLLTEAKQEDKFKDLYRFTFQFGLDSEEGQRSLHREIAIALWKLVFTQNNPPVLDQWLNFLTENPSGIKGISRDTWNMFLNFTQVIGPDLSNYSEDEAWPSLFDTFVEWEMERRKREGEGRGALSSGPEGLCPEEQT

SEQ ID NO: 154 - DNA, 4043 bp, Homo sapiens
  source 1..4043: mol_type = other DNA
aagttactgtgaggcggcggctaagaaggcggctctggtggcggcggtggaggctgaggcggcggccgaggcggcgacggaggaaacagaagatggcagattttttgaaaggactgcctgtctacaacaaaagcaattttagtcgatttcacgcggactccgtgtgcaaagcctcgaaccgacggccctcagtctacctgcctacccgcgagtacccgtctgaacagatcatcgtgacagaaaagacaaacatcctcctgcgctacctgcatcagcaatgggacaaaaagaacgctgccaagaagagagaccaggagcaagtggagctggaaggcgagagctccgcacctccccgcaaggtggcgcggaccgacagcccagacatgcacgaggacacttaagactctcaactccacaggcgcctcctgccaggtctgctcctcggtcgcccacccgcctgcccgccatgtgtaagcaccccgcccgcccgcctccctgccggcccatccacaccctgcgtccacaccacttccaacctcataggagccgatgtatttattttccttgagtttttatttatgctgtaacctgtatcaagcgttggttaaaggggacatcagacccagtagtgtgatgttggtagatgctttttaaaaaaaacaacattgtccccccgacccccgccttccatcgggccagttccccgattcctgcccccagttctccagagaaccagagtgtgtctgtgagagtctctagcgggggctttactgtggccgggcgacaggggcgggcccggggtggcctgacctaccaggacagccgagtggccttctcccccccaacaccggtccaggccattgagactcggtcttgtcccacgcttcgcccggaactttcccatgcccaggcctcactcagcgtgcacgcacgttggggagaagtcggcccttgggatctttctcttgagtcattttatttttatcatggactagtgcgtgctccgtgtccaccccaataaaagggtctttcctacttgacctcgcgtctttgctccacacaccttggctgcagaggacggagcccctgggagtcatccctgttgtcaccaagaggagtgagaagggccccccacgccaggggccccaggaccggctggattctctcgtgggcttgctgaggccaccatgttcaaggccaagacctgcctggaccatcccctctgcctctcctgtcaaggtgaccccaaggacaggtcattcctgagagacggtccatggtgccaaggatggagcggggtcagccccctgcctgggataccgccaagcagggcagcgcacctgtcagacaccgcagagatggccggcctcatccgggggcctggggtctctggcctctgctgctcccctgaggcatggtgacagtacagacggcatctggccggtcttgctgtcctaggtggtggcctcacccttgctgggtcatagaggagctgtacagaaggttggcacctggcagttggcatgtgccatggccgctcatggggacccctcttccgccagctgggctgggtttggggctgagcttgggtatgtaggggtgttcgggctctgggcagaaggtttgtggccctgaccactgagcctggggctgggggaacaccgcttctccccttattgcccccactggtggtggtggggatctcagttttcttttgttttgttttgtttgtttgtttgagttggggtcttgtactctttcccaggctggagtgcagtggcgtaatcacagctcactgcagcctcgacctcaagccttcctcccacctcagccttccaagccgctgggaccacaggcacccaccaccatgcctggctaatttttttttttttttgagatggagtctcgctgtgtctcccaggctggagtgcagtggcaagatctcagctcactacaacctctgcctcccaggttcaagtgattctcctacctcagcctcctgagtagctgggattacacgcgtgcgcccctacacccagctaatttttctatttttagtggagacggcgttttgtcatgttggccaggctggtctcgaactcctgacctcaggtgcttcgcctgcctcggcctcccaaagtgctgtgaccgcacctggctgcctggctaatattttaaaaattttttgtagagacagggtttcaccatgttgcccaggctggtctcaaactcctgggctcaagtcatccaccttcctcagcctcccaaagtgctggggttacagacgtgaaccaccgtgcctggcagaggtctctgttttgagagctgagtctgagggcgttgggatggtgtagggttgggccacagagctagcagacactccgggctatggagggtccgcctgccccagattccactgtggagggccctgcctgtgtcagaccctcgggcctaggcggcccatctctcccaaggacggagagtgccagggtgggctcccgtcctacacaaggagtggctgaccaggcccaggcacagcacagccaccctgctgtacctcccagctcccggcagtgtctacaccacagtgatggtgctacaggggccatgtggtcacaggacaggtggtcaggaaatgcacacttgactgcggtcgatggtgccgggtccggctgaatgccctggaggctcccaggccagctggggagtcccagtccccagggttggtgtgacctgggcaggcctgcggtgtccatctgtgaatgactgagatggtgggacttcagcttccaaggccaggggccagagtgggagcagggggcactcccgcctttcccctcggcctgtctagacctctctggctcccagtttctgctttgagtggctgggggctgtctcctgcctgtgctgtctgcccgtcgctctgcagggctgctgggcgggcacctccttcccctcccctacctcagctccctcctttggggtctgagggctgtgccccagcttgcctccctgtggcctccccctagaacccctgggtctgtcgggacatgccccacctggcacacacaccctgtgtagctcccactgcctgtgggaggacgctgggcccctgagccggcctctgtctacccctcctgcctttggggtcccctttaccccactgttcccccaaactgccttccaccttctccgcctttgcacaggctgttctcctgcctccagtgaactctgacttctccacagcctcccaaagggccccttgctcacactggcccagccctgcagcatggccatgttggtctctgagccttaagcctttggatgtggacacatttgtcctcttcctgaaaaatgtgagggtctgagaggccacgttcctgttcctgagtcatacgacagagtcccagtgacttgggtctgatgtctgtcccacagtgggacatccctgctgcatcccaatgccaccccgtgtcctggggacacccaaatgtgccattctctcagtatcacaagtcggggactgcaggaggctcaggtgccaggtgccttctgatgttcatgccacaagctcttcccactgtctctggctccccagacgatgttccaggaggcgggtgtgccagaaggggccacgtcttgcaaaccaccgcgctgtcctctttgagaaggagtcttactcaggactggggcctgtgcacacattgtcgcctcttttcagcacttagagattccttcctttgtctagtggctgaagccagggctgaagttggcctccaaatctgggccgtctcagaggcggcgcagcctggagttttccatctgtggccaagacccagtttttgggaggaggccctcatgggtcaagccagcctgtaccaggatggggggagggggttcccaacctaggccccagccacccagactcccccacccccactcccttttccactgctctgacctcgggcactgttgaaatatagtttttattgcatttctgccgttttacaaaaatatgacaaaataaattaaaaacaaataaa

SEQ ID NO: 155 - protein, 102 aa, Homo sapiens
MADFLKGLPVYNKSNFSRFHADSVCKASNRRPSVYLPTREYPSEQIIVTEKTNILLRYLHQQWDKKNAAKKRDQEQVELEGESSAPPRKVARTDSPDMHEDT

SEQ ID NO: 156 - DNA, 855 bp, Homo sapiens
  source 1..855: mol_type = other DNA
ggctcgcggggtgacgtcacagcccgacgcgccacccagctgtttttgtgctcccagctctagcgaaaagccgccggtatttctccatctggctctcctctacctccaggcaggctcacccgagatccccgccccgaaccccccctgcacactcggcccagcgctgttgcccccggagcggacgtttctgcagctattctgagcacaccttgacgtcggctgagggagcgggacagggtcagcggcgaaggaggcaggccccgcgcggggatctcggaagccctgcggtgcatcatgaagttccagtacaaggaggaccatccctttgagtatcggaaaaaggaaggagaaaagatccggaagaaatatccggacagggtccccgtgattgtagagaaggctccaaaagccagggtgcctgatctggacaagaggaagtacctagtgccctctgaccttactgttggccagttctacttcttaatccggaagagaatccacctgagacctgaggacgccttattcttctttgtcaacaacaccatccctcccaccagtgctaccatgggccaactgtatgaggtaatggttctggttgcacaatactggatgccgtccagtgcagtctggcatcctctagcccttgttctagatgcgttgataacacatctgagaagtggggcagaaggtgttatttatccggatcctcttacatatggcagtgtaaggctctgagagattagatacctcttgttttttagggattagccactctactagatttaatccttctgaaatcttgtctgactatagtcttgtctgactatagtgttttaatgctggactgtttattga

SEQ ID NO: 157 - protein, 146 aa, Homo sapiens
MKFQYKEDHPFEYRKKEGEKIRKKYPDRVPVIVEKAPKARVPDLDKRKYLVPSDLTVGQFYFLIRKRIHLRPEDALFFFVNNTIPPTSATMGQLYEVMVLVAQYWMPSSAVWHPLALVLDALITHLRSGAEGVIYPDPLTYGSVRL

SEQ ID NO: 158 - DNA, 6096 bp, Homo sapiens
  source 1..6096: mol_type = other DNA
cttgttcctccgccgttgcaatgaactattttctctcagtccggggtggtacttttgagtaaccccttccaaatagaaacccataccagcctatttagctcggtctccactatatgaaggtttcctagggcttggtgtgacgcaacgtatacgaggctcggaaggacaccccgcggaaggatccggtttgttgtggtgtggggaggggagacgctgacaaaccaagatggcggcggcggcgctgaaggccgcggcgtttgggaggtaactgtggtggcgaaggctgcggtagtggggaggcaaccacacagtttggaagaaacggagcgggacgaagaggcggtagcagtagagtcagcctgagactctcagagcacgacggccacacgcccccttaggccctcggcgggcggcggctgccccgcttagggcctagcctccgagcattgcctcggcttcaaacagcggcggcgccatgagtccttaagggcggtccaagcctcccgatccctggcccagacctcgggcccaccatggagccggggtccgacgatttcctaccgccaccggagtgcccggtgttcgagcctagctgggccgagttccgagaccctcttggctacatcgcgaaaatcaggcccatcgcagagaaatcgggcatttgcaagatccgcccacccgcgattgtggtggaggaaggtggttatgaagctatctgcaaggaccgtcggtgggctcgggtagcccagcgcctcaactatccaccaggcaaaaatattggctccttgctacgctcccactacgaacgcattgtttatccctatgaaatgtaccagtctggagccaaccttgtgcagtgtaacacacgtccatttgataatgaggagaaggacaaggaatacaaaccccacagcatccccctacgacagtctgtgcagccttccaagttcaacagctatggccggcgggccaagagactgcagcctgatccggaacccacagaggaagacattgagaagaatccagagctgaaaaagctacagatctatggggcaggccccaagatgatgggcctgggcctcatggccaaagacaagactctgcggaagaaagataaggaggggcctgagtgtccccccacagtagtggtgaaggaggagttaggtggggatgtgaaggtggagtcaacatcgcctaagaccttcctggagagcaaggaggagctgagtcacagcccagaaccctgcaccaagatgaccatgaggctacggaggaaccacagcaatgcccagtttattgagtcatatgtctgccggatgtgttctcgaggggatgaggatgacaagctcctgctgtgtgatggctgtgatgacaactaccacatcttctgcctgctgcctcctctgcctgagatccccaagggtgtctggcggtgcccaaagtgtgtcatggcggagtgtaagcggcccccagaagcctttggctttgagcaggctacccgggaatacactctgcagagctttggcgagatggccgactcctttaaagctgactacttcaacatgcccgtgcatatggtgcccacagaacttgtggagaaggagttctggaggctggtaaatagcattgaggaagatgtgactgttgagtatggagctgacatccattccaaagaatttggcagcggtttccctgtcagtgacagtaaacggcacctaacccccgaagaggaggagtatgctaccagtggttggaacctaaatgtgatgccggtgttggaacagtctgtactgtgccacatcaatgcagatatctctggcatgaaggtgccctggctctacgtgggcatggtcttctcagccttttgctggcatattgaggatcactggagttactccattaactacctccactggggtgagccgaagacctggtatggggtgccctcacttgcagcagaacatttggaagaagtgatgaagaagctgacacctgaactatttgatagccagcctgacctcctgcaccaacttgtcaccctcatgaatcccaacaccctcatgtcccatggtgtgccagttgtccgcacaaaccagtgtgcaggagagtttgtcatcaccttcccccgtgcttaccacagcggcttcaaccaaggctacaactttgccgaggctgtcaacttttgcactgctgactggttgcctgctgggcgccagtgcattgagcactaccgccggctccggagatactgcgtcttctcccatgaggagcttatctgcaagatggctgcctgcccagagaagctagacctgaacctggcggcagctgtgcataaggagatgttcatcatggtgcaagaagagcggcgtctacgaaaggccctgctggagaagggtatcacagaggctgagcgagaggctttcgagctgctcccagatgatgagcgccagtgtatcaagtgcaagactacgtgtttcctgtcagccctggcctgctacgactgcccagacggccttgtctgcctttcccacatcaatgatctctgcaagtgctccagtagccggcagtacctgcggtatcggtataccttggatgagcttcctgccatgctgcataagctgaaggttcgggctgagtcctttgacacctgggccaacaaagtgcgagtggccctggaggtggaggatgggcggaagcgcagccttgaagaactgagggcactagagtctgaagcccgtgagcggaggtttcctaatagtgagctgctgcagcaactaaagaactgcctgagtgaggcagaggcttgcgtgtcccgagctctgggactggtcagcggccaggaagctggcccccacagggtggctggtctacagatgaccctgactgagctccgggcctttctggaccagatgaacaacctgccttgcgccatgcaccagattggggatgtcaagggtgttctggaacaggtggaggcctaccaggctgaggctcgtgaggccctggcctcactgccctccagtccagggctactgcagtccctgttggagagggggcggcagctgggggtggaggtgcctgaggcccagcagctccagcggcaggtggaacaggcgcgatggctggatgaggtgaaacgcacactggccccctcagcccgaaggggcaccttggctgtcatgcgaggactgttggtcgcgggtgccagtgtagcccctagccctgctgtggataaagcccaggccgagctgcaggaactgctgaccattgctgaacgctgggaggagaaagcccacctctgcctggaggccaggcagaagcatccaccagccacacttgaggccataatccgtgaagcggaaaacatccctgttcacctgcccaacatccaggctctcaaggaggctcttgctaaggcccgggcctggattgctgatgttgatgagatccaaaatggtgaccactacccctgcctggatgacttggagggcctagtagctgtgggccgggacctacctgtggggctggaggagctgagacagctagagctacaggtactgacagcgcactcctggagggagaaggcctccaagaccttcctcaagaaaaattcttgctacacgctgctggaggttctctgcccatgtgcagatgccggctcagacagcaccaagcgcagccggtggatggagaaggagctggggttgtacaaatctgacacagagctgctggggctgtctgcgcaggacctcagggacccaggctctgtgatcgtggccttcaaggagggggaacagaaggagaaggagggtatcctgcagctgcgtcgcaccaattcggccaagcccagtccactggcatcatcgagcacggcctcctctacaacctctatctgtgtgtgtgggcaggtgctggctggggcgggagctctgcagtgtgacctgtgtcaggactggttccatgggcggtgtgtgtcagtgcctcgcctcctcagctctccgaggcccaatcccacctcatccccactgctggcctggtgggaatgggacaccaaattcctgtgtccactgtgtatgcgctcaaggcgcccgcgcctggagaccatcctggcactgctggtagccctgcagagactgcctgtgcggctgcccgagggcgaggccctgcagtgcctcacagagagggccatcagctggcaaggccgcgccaggcaggctctggcctctgaagatgtgactgctcttttgggacggctggctgagctccgccaacggctacaggctgaacctagacctgaggagcctcctaactaccctgcagcccctgcttctgaccccctcagagagggcagtggcaaggatatgcctaaggtccagggcttactggagaatggagacagtgtgaccagtcctgagaaggtagccccggaggagggctcagatctggagctgctgtcctcgctgttgccacagttgactggccctgtgttggaactgcctgaggcaacccgggcccccttggaggagctcatgatggagggggacctgctcgaggtgaccctggatgagaaccacagcatccctgagtcccttgacttttgtattctgactccaaggtattgttcagacctcagctcctgggggccggcccctggagtcttccctccctggtagcctctaaccagcattcccagacacctgaggcagatagatggatgggctggtgggcaggggggtggctggggctgggccatcaccattccagagacaaggccagtgtatatgcaaactgggggactctcctcccttctctccccagttctggtcctggccaggccatgctacactaacccctgcccccactctcctcccctcttttccttccttcctacccccttctccctctcccttcccctgactgttccacccaggaggaggaaacttcacatagccgtgctcacagttttttattttaaaggaatttggctggggagctgaacagggctccctgtgatctgaagaaagcttttggtgcttgtcctcacaaccacctcagtcctccctccctgtcctcccctgtctcctttcctcctcctgggttcatgttgtaataaaagaagattgttggtgtgtaattaatttgttcaaaagaaaaaaaaaagcaaaacaagaaacttggttccaactgaagcctattttaattttattttattattttcctcttgttagaaataaaacccttagaaacattttttggaaacatgtttctgaagtgcatttctcttagacggggaagacagtgcttccatcaccagtcagtggagcagctgtagtgctggcaggagcactagggctgaagccagggagctctgggttctgaaatcaagttccaccagcttcttaaccttgggcaagacattctgatcctcccccgactctaaccccaagccactttccctcaagtccaaacagatgggctcgggccccctcacccaaactcctacactacaacctcccccagttgatgccctccagtttatcctcctcaagctcccaaagggatttttttgttaatggctttattgagatataatttacatactataaaattcacttgtttgaaatgtacaattcagtgatttggggggtttctaaagtgtagatctgattatatactgcttaaaaccttccatgatgctttattgcccttaagattatacatagaatctcgttcttcctagaatgttttcctgtctaacccatctactgcataattccctgatttttctccacaggttatgcccctgatgaatggggactaaagctcagatgtgtggtcatttgcaacccctgagttcacttttttaagacagcttattgatatatataatgtacataccatacagtcacccacttaaaagtatacaattaaatagcttttagtatattcagagttgtgcagccatcattcgaaaaaaaatttcagaacattttcatcactgcagaaagaaactccatatcccttaggcgtcctttacccctcatcccatttgcctattctggacattttacataaatggaatcgtataatatgtga

SEQ ID NO: 159 - protein, 1379 aa, Homo sapiens
MEPGSDDFLPPPECPVFEPSWAEFRDPLGYIAKIRPIAEKSGICKIRPPAIVVEEGGYEAICKDRRWARVAQRLNYPPGKNIGSLLRSHYERIVYPYEMYQSGANLVQCNTRPFDNEEKDKEYKPHSIPLRQSVQPSKFNSYGRRAKRLQPDPEPTEEDIEKNPELKKLQIYGAGPKMMGLGLMAKDKTLRKKDKEGPECPPTVVVKEELGGDVKVESTSPKTFLESKEELSHSPEPCTKMTMRLRRNHSNAQFIESYVCRMCSRGDEDDKLLLCDGCDDNYHIFCLLPPLPEIPKGVWRCPKCVMAECKRPPEAFGFEQATREYTLQSFGEMADSFKADYFNMPVHMVPTELVEKEFWRLVNSIEEDVTVEYGADIHSKEFGSGFPVSDSKRHLTPEEEEYATSGWNLNVMPVLEQSVLCHINADISGMKVPWLYVGMVFSAFCWHIEDHWSYSINYLHWGEPKTWYGVPSLAAEHLEEVMKKLTPELFDSQPDLLHQLVTLMNPNTLMSHGVPVVRTNQCAGEFVITFPRAYHSGFNQGYNFAEAVNFCTADWLPAGRQCIEHYRRLRRYCVFSHEELICKMAACPEKLDLNLAAAVHKEMFIMVQEERRLRKALLEKGITEAEREAFELLPDDERQCIKCKTTCFLSALACYDCPDGLVCLSHINDLCKCSSSRQYLRYRYTLDELPAMLHKLKVRAESFDTWANKVRVALEVEDGRKRSLEELRALESEARERRFPNSELLQQLKNCLSEAEACVSRALGLVSGQEAGPHRVAGLQMTLTELRAFLDQMNNLPCAMHQIGDVKGVLEQVEAYQAEAREALASLPSSPGLLQSLLERGRQLGVEVPEAQQLQRQVEQARWLDEVKRTLAPSARRGTLAVMRGLLVAGASVAPSPAVDKAQAELQELLTIAERWEEKAHLCLEARQKHPPATLEAIIREAENIPVHLPNIQALKEALAKARAWIADVDEIQNGDHYPCLDDLEGLVAVGRDLPVGLEELRQLELQVLTAHSWREKASKTFLKKNSCYTLLEVLCPCADAGSDSTKRSRWMEKELGLYKSDTELLGLSAQDLRDPGSVIVAFKEGEQKEKEGILQLRRTNSAKPSPLASSSTASSTTSICVCGQVLAGAGALQCDLCQDWFHGRCVSVPRLLSSPRPNPTSSPLLAWWEWDTKFLCPLCMRSRRPRLETILALLVALQRLPVRLPEGEALQCLTERAISWQGRARQALASEDVTALLGRLAELRQRLQAEPRPEEPPNYPAAPASDPLREGSGKDMPKVQGLLENGDSVTSPEKVAPEEGSDLELLSSLLPQLTGPVLELPEATRAPLEELMMEGDLLEVTLDENHSIPESLDFCILTPRYCSDLSSWGPAPGVFPPW

SEQ ID NO: 160 - DNA, 1286 bp, Homo sapiens
  source 1..1286: mol_type = other DNA
acacactcacaaactcactcactgacacactcacacactcacttacacctcccccagctcacctcctccccaccccagcatggccgcgtccaccatgtccatccgctccagcgcttactccgactcctggcaggtggacgactgcccagagagctgctgtgagcccccctgctgcgccaccagctgctgcgccccggccccctgcctgaccctggtctgcaccccagtgagccgtgtatccagcccctgctgccaggtgacctgtgagcccagcccctgccaatcaggctgcaccagctcctgcacgccctcgtgctgccagcagtctagctgccagccggcttactgcacctcctccccctgccagcaggcctgctgcgtgcccgtctgctgcaagcctgtgtgctgcgtgcccgtctgctgtggggcttcttcgtgctgccaacagtctagctaccagccagcttgctgtgcctcttcctcctgccagccggcctgctgtgtgcccgtctgctgcaaacctgtgtgctgtgcgcccacctgctctgaggattcctattcatgctgccaacagtctagctgccagccagcttgctgcacttcctccccctgccagcagtcctactgtgtgcctgtctgctgtaagcctgtctgctgcaaacccatctgctgtgtgcctgtctgctctggggcttcctctttgtgctgccagcagtctggctgccagccggcttgctgcaccacctcctgctgcagaccctcctcctctgtgtccctcctctgccgccctgtgtgcaggcccgcctgctgcgtgcccgtctcctcctgctgtgcccccacctcctcccgccagcccagctattgccgccaggcctcctgtgtgtcccttctctgccgccctgtgtgctcccgcccggcctgctacagcttctcctcaggccagaagtccagctgctgacggtcatgtcccccagggccagccgggctcaggccccacctccctgccagtccttggacctcccagcccacccagcctcagcacagctcaacacagaaggagcagccccagccacagccgcccagccccggggtctcagatgctcactggctcctccctgacctcccccccgggcaggcgagccctggcttctcctcacggtgcttcctggctgcagaccacaaccctccgctggtcgctggttggggacgggccctcctgacccgggtctcacccccagcagcgtcaccctctgcccctgagcaccaataaagcgtctgcggcccca

SEQ ID NO: 161 - protein, 292 aa, Homo sapiens
MAASTMSIRSSAYSDSWQVDDCPESCCEPPCCATSCCAPAPCLTLVCTPVSRVSSPCCQVTCEPSPCQSGCTSSCTPSCCQQSSCQPAYCTSSPCQQACCVPVCCKPVCCVPVCCGASSCCQQSSYQPACCASSSCQPACCVPVCCKPVCCAPTCSEDSYSCCQQSSCQPACCTSSPCQQSYCVPVCCKPVCCKPICCVPVCSGASSLCCQQSGCQPACCTTSCCRPSSSVSLLCRPVCRPACCVPVSSCCAPTSSRQPSYCRQASCVSLLCRPVCSRPACYSFSSGQKSSC

SEQ ID NO: 162 - DNA, 6036 bp, Homo sapiens
  source 1..6036: mol_type = other DNA
agtgcagacgcggaactggcgcccgctcggagcggcgccgcgctggggagcgactgacgccccgctgccgggggacgtcgggctgggcctggccagtcccccagagcttgggagacttcgattttcagaattcctcctgggaatgctgactccttgcttggtgccctgatgcttctctgagataaactgatgaattggaaccatggtgcaaaagaagaagttctgtcctcggttacttgactatctagtgatcgtaggggccaggcacccgagcagtgatagcgtggcccagactcctgaattgctacggcgataccccttggaggatcacactgagtttcccctgcccccagatgtagtgttcttctgccagcccgagggctgcctgagcgtgcggcagcggcgcatgagccttcgggatgatacctcttttgtcttcaccctcactgacaaggacactggagtcacgcgatatggcatctgtgttaacttctaccgctccttccaaaagcgaatctctaaggagaagggggaaggtggggcagggtcccgtgggaaggaaggaacccatgccacctgtgcctcagaagagggtggcactgagagctcagagagtggctcatccctgcagcctctcagtgctgactctacccctgatgtgaaccagtctcctcggggcaaacgccgggccaaggcggggagccgctcccgcaacagtactctcacgtccctgtgcgtgctcagccactaccctttcttctccaccttccgagagtgtttgtatactctcaagcgcctggtggactgctgtagtgagcgccttctgggcaagaaactgggcatccctcgaggcgtacaaagggacaccatgtggcggatctttactggatcgctgctggtagaggagaagtcaagtgcccttctgcatgaccttcgagagattgaggcctggatctatcgattgctgcgctccccagtacccgtctctgggcagaagcgagtagacatcgaggtcctaccccaagagctccagccagctctgacctttgctcttccagacccatctcgattcaccctagtggatttcccactgcaccttcccttggaacttctaggtgtggacgcctgtctccaggtgctaacctgcattctgttagagcacaaggtggtgctacagtcccgagactacaatgcactctccatgtctgtgatggcattcgtggcaatgatctacccactggagtatatgtttcctgtcatcccgctgctacccacctgcatggcatcagcagagcagctgctgttggctccaaccccgtacatcattggggttcctgccagcttcttcctctacaaactggacttcaaaatgcctgatgatgtatggctagtggatctggacagcaatagggtgattgcccccaccaatgcagaagtgctgcctatcctgccagaaccagaatcactagagctgaaaaagcatttaaagcaggccttggccagcatgagtctcaacacccagcccatcctcaatctggagaaatttcatgagggccaggagatcccccttctcttgggaaggccttctaatgacctgcagtccacaccgtccactgaattcaacccactcatctatggcaatgatgtggattctgtggatgttgcaaccagggttgccatggtacggttcttcaattccgccaacgtgctgcagggatttcagatgcacacgcgtaccctgcgcctctttcctcggcctgtggtagcttttcaagctggctcctttctagcctcacgtccccggcagactccttttgccgagaaattggccaggactcaggctgtggagtactttggggaatggatccttaaccccaccaactatgcctttcagcgaattcacaacaatatgtttgatccagccctgattggtgacaagccaaagtggtatgctcatcagctgcagcctatccactatcgcgtctatgacagcaattcccagctggctgaggccctgagtgtaccaccagagcgggactctgactccgaacctactgatgatagtggcagtgatagtatggattatgacgattcaagctcttcttactcctcccttggtgactttgtcagtgaaatgatgaaatgtgacattaatggtgatactcccaatgtggaccctctgacacatgcagcactgggggatgccagcgaggtggagattgacgagctgcagaatcagaaggaagcagaagagcctggcccagacagtgagaactctcaggaaaaccccccactgcgctccagctctagcaccacagccagcagcagccccagcactgtcatccacggagccaactctgaacctgctgactctacggagatggatgataaggcagcagtaggcgtctccaagcccctcccttccgtgcctcccagcattggcaaatcgaacgtggacagacgtcaggcagaaattggagaggggtcagtgcgccggcgaatctatgacaatccatacttcgagccccaatatggctttccccctgaggaagatgaggatgagcagggggaaagttacactccccgattcagccaacatgtcagtggcaatcgggctcaaaagctgctgcggcccaacagcttgagactggcaagtgactcagatgcagagtcagactctcgggcaagctctcccaactccaccgtctccaacaccagcaccgagggcttcgggggcatcatgtcttttgccagcagcctctatcggaaccacagtaccagcttcagtctttcaaacctcacactgcccaccaaaggtgcccgagagaaggccacgcccttccccagtctgaaagtatttgggctaaatactctaatggagattgttactgaagccggccccgggagtggtgaaggaaacaggagggcgttagtggatcagaagtcatctgtcattaaacacagcccaacagtgaaaagagaacctccatcaccccagggtcgatccagcaattctagtgagaaccagcagttcctgaaggaggtggtgcacagcgtgctggacggccagggagttggctggctcaacatgaaaaaggtgcgccggctgctggagagcgagcagctgcgagtctttgtcctgagcaagctgaaccgcatggtgcagtcagaggacgatgcccggcaggacatcatcccggatgtggagatcagtcggaaggtgtacaagggaatgttagacctcctcaagtgtacagtcctcagcttggagcagtcctatgcccacgcgggtctgggtggcatggccagcatctttgggcttttggagattgcccagacccactactatagtaaagaaccagacaagcggaagagaagtccaacagaaagtgtaaataccccagttggcaaggatcctggcctagctgggcggggggacccaaaggctatggcacaactgagagttccacaactgggacctcgggcaccaagtgccacaggaaagggtcctaaggaactggacaccagaagtttaaaggaagaaaattttatagcatctattgaattgtggaacaagcaccaggaagtgaaaaagcaaaaagctttggaaaaacagaggcctgaagtaatcaaacctgtctttgaccttggtgagacagaggagaaaaagtcccagatcagcgcagacagtggtgtgagcctgacgtctagttcccagaggactgatcaagactctgtcatcggcgtgagtccagctgttatgatccgcagctcaagtcaggattctgaagttagcaccgtggtgagtaatagctctggagagacccttggagctgacagtgacttgagcagcaatgcaggtgatggaccaggtggcgagggcagtgttcacctggcaagctctcggggcactttgtctgatagtgaaattgagaccaactctgccacaagcaccatctttggtaaagcccacagcttgaagccaagcataaaggagaagctggcaggcagccccattcgtacttctgaagatgtgagccagcgagtctatctctatgagggactcctaggaagggacaaaggatccatgtgggaccagttagaggatgcagctatggagaccttttctataagcaaagagcgttctactttatgggaccaaatgcaattctgggaagatgccttcttagatgctgtgatgttggagagagaagggatgggtatggaccagggtccccaggaaatgatcgacaggtacctgtcccttggagaacatgaccggaagcgcctggaagatgatgaagatcgcttgttggccacacttctgcacaacctcatctcctacatgctgctgatgaaggtaaataagaatgacatccgcaagaaggtgaggcgcctaatgggaaagtcgcacattgggcttgtgtacagccagcaaatcaatgaggtgcttgatcagctggcgaacctgaatggacgcgatctctctatctggtccagtggcagccggcacatgaagaagcagacatttgtggtacatgcagggacagatacaaacggagatatctttttcatggaggtgtgcgatgactgtgtggtgttgcgtagtaacatcggaacagtgtatgagcgctggtggtacgagaagctcatcaacatgacctactgtcccaagacgaaggtgttgtgcttgtggcgtagaaatggctctgagacccagctcaacaagttctatactaaaaagtgtcgggagctgtactactgtgtgaaggacagcatggagcgcgctgccgcccgacagcaaagcatcaaacccggacctgaattgggtggcgagttccctgtgcaggacctgaagactggtgagggtggcctgctgcaggtgaccctggaagggatcaacctcaaattcatgcacaatcaggagcggaaggttttcatagagctgaatcacattaaaaagtgcaatacagttcgaggcgtctttgtcctggaggaatttgttcctgaaattaaagaagtggtgagccacaagtacaagacaccaatggcccacgaaatctgctactccgtattatgtctcttctcgtacgtggctgcagttcatagcagtgaggaagatctcagaaccccgccccggcctgtctctagctgatggagaggggctacgcagctgccccagcccagggcacgcccctggccccttgctgttcccaagtgcacgatgctgctgtgactgaggagtggatgatgctcgtgtgtcctctgcaagccccctgctgtggcttggttggttaccggttatgtgtccctctgagtgtgtcttgagcgtgtccaccttctccctctccactcccagaagaccaaactgccttcccctcagggctcaagaatgtgtacagtctgtggggccggtgtgaacccactattttgtgtccttgagacatttgtgttgtggttccttgtccttgtccctggcgttataactgtccactgcaagagtctggctctcccttctctgtgacccggcatgactgggcgcctggagcagtttcactctgtgaggagtgagggaaccctggggctcaccctctcagaggaagggcacagagaggaagggaagaattggggggcagccggagtgagtggcagcctccctgcttccttctgcattcccaagccggcagctactgcccagggcccgcagtgttggctgctgcctgccacagcctctgtgactgcagtggagcggcgaattccctgtggcctgccatgccttcggcatcagaggatggagtggtcgaggctagtggagtcccagggaccgctggctgctctgcctgagcatcagggagggggcaggaaagaccaagctgggtttgcacatctgtctgcaggctgtctctccaggcacggggtgtcaggagggagagacagcctgggtatgggcaagaaatgactgtaaatatttcagccccacattatttatagaaaatgtacagttgtgtgaatgtgaaataaatgtcctcaactccc

SEQ ID NO: 163 - protein, 1647 aa, Homo sapiens
MVQKKKFCPRLLDYLVIVGARHPSSDSVAQTPELLRRYPLEDHTEFPLPPDVVFFCQPEGCLSVRQRRMSLRDDTSFVFTLTDKDTGVTRYGICVNFYRSFQKRISKEKGEGGAGSRGKEGTHATCASEEGGTESSESGSSLQPLSADSTPDVNQSPRGKRRAKAGSRSRNSTLTSLCVLSHYPFFSTFRECLYTLKRLVDCCSERLLGKKLGIPRGVQRDTMWRIFTGSLLVEEKSSALLHDLREIEAWIYRLLRSPVPVSGQKRVDIEVLPQELQPALTFALPDPSRFTLVDFPLHLPLELLGVDACLQVLTCILLEHKVVLQSRDYNALSMSVMAFVAMIYPLEYMFPVIPLLPTCMASAEQLLLAPTPYIIGVPASFFLYKLDFKMPDDVWLVDLDSNRVIAPTNAEVLPILPEPESLELKKHLKQALASMSLNTQPILNLEKFHEGQEIPLLLGRPSNDLQSTPSTEFNPLIYGNDVDSVDVATRVAMVRFFNSANVLQGFQMHTRTLRLFPRPVVAFQAGSFLASRPRQTPFAEKLARTQAVEYFGEWILNPTNYAFQRIHNNMFDPALIGDKPKWYAHQLQPIHYRVYDSNSQLAEALSVPPERDSDSEPTDDSGSDSMDYDDSSSSYSSLGDFVSEMMKCDINGDTPNVDPLTHAALGDASEVEIDELQNQKEAEEPGPDSENSQENPPLRSSSSTTASSSPSTVIHGANSEPADSTEMDDKAAVGVSKPLPSVPPSIGKSNVDRRQAEIGEGSVRRRIYDNPYFEPQYGFPPEEDEDEQGESYTPRFSQHVSGNRAQKLLRPNSLRLASDSDAESDSRASSPNSTVSNTSTEGFGGIMSFASSLYRNHSTSFSLSNLTLPTKGAREKATPFPSLKVFGLNTLMEIVTEAGPGSGEGNRRALVDQKSSVIKHSPTVKREPPSPQGRSSNSSENQQFLKEVVHSVLDGQGVGWLNMKKVRRLLESEQLRVFVLSKLNRMVQSEDDARQDIIPDVEISRKVYKGMLDLLKCTVLSLEQSYAHAGLGGMASIFGLLEIAQTHYYSKEPDKRKRSPTESVNTPVGKDPGLAGRGDPKAMAQLRVPQLGPRAPSATGKGPKELDTRSLKEENFIASIELWNKHQEVKKQKALEKQRPEVIKPVFDLGETEEKKSQISADSGVSLTSSSQRTDQDSVIGVSPAVMIRSSSQDSEVSTVVSNSSGETLGADSDLSSNAGDGPGGEGSVHLASSRGTLSDSEIETNSATSTIFGKAHSLKPSIKEKLAGSPIRTSEDVSQRVYLYEGLLGRDKGSMWDQLEDAAMETFSISKERSTLWDQMQFWEDAFLDAVMLEREGMGMDQGPQEMIDRYLSLGEHDRKRLEDDEDRLLATLLHNLISYMLLMKVNKNDIRKKVRRLMGKSHIGLVYSQQINEVLDQLANLNGRDLSIWSSGSRHMKKQTFVVHAGTDTNGDIFFMEVCDDCVVLRSNIGTVYERWWYEKLINMTYCPKTKVLCLWRRNGSETQLNKFYTKKCRELYYCVKDSMERAAARQQSIKPGPELGGEFPVQDLKTGEGGLLQVTLEGINLKFMHNQVFIELNHIKKCNTVRGVFVLEEFVPEIKEVVSHKYKTPMAHEICYSVLCLFSYVAAVHSSEEDLRTPPRPVSS

SEQ ID NO: 164 - DNA, 3369 bp, Homo sapiens
  source 1..3369: mol_type = other DNA
gtcgtgtgcggctcggggtaatagggctgctgctcggccggccggcggcggcgagcagcaggggcatgagggctaacccgggaagcggcagctgagcgggccgggaggagcgccggtccccgtggatcccgagagtgcagagctcggggcaggggccgggaggcgtgggggagccgggccctcccctcaggaacgtgtcccggggccgacccggcccgtagtgtggaagcagcttcaggtaggtgagctcgtgaaacaatatgaagaggagaaaatagccttttaaggaaattggcccacagaaaggatggccttcttggacaatccaactatcattctagctcatattcgacagtcacatgtgaccagtgatgacacgggaatgtgtgagatggttctcattgatcatgatgttgacctagagaagattcatcctccttcaatgcctggagacagtgggtcagaaattcagggaagcaatggtgagactcagggctatgtatatgcccagtcagtcgatattacctcaagttgggactttggtattagaagacgctcaaacacagctcaaagattagaacgactccgaaaagagagacaaaaccagatcaaatgcaaaaatattcagtggaaagaaagaaattctaagcaatcagcccaggagttaaagtcactgtttgaaaaaaaatctctcaaagagaagcctccaatttctgggaagcagtcgatattatctgtacgcctagaacagtgccctctgcagctgaataacccttttaacgagtattccaaatttgatggcaagggtcatgtaggtacaacagcaaccaagaagatcgatgtctacctccctctgcactcgagccaggacagactgctgccaatgaccgtggtgacaatggccagcgccagggtgcaggacctgatcgggctcatctgctggcagtatacaagcgaaggacgggagccgaagctcaatgacaatgtcagtgcctactgcctgcatattgctgaggatgatggggaggtggacaccgatttccccccgctggattccaatgagcccattcataagtttggcttcagtactttggccctggttgaaaagtactcatctcctggtctgacatccaaagagtcactctttgttcgaataaatgctgctcatggattctcccttattcaggtggacaacacaaaggttaccatgaaggaaatcttactgaaggcagtgaagcgaagaaaaggatcccagaaagtttcaggccctcagtaccgcctggagaagcagagcgagcccaatgtcgccgttgacctggacagcactttggagagccagagcgcatgggagttctgcctggtccgcgagaacagttcaagggcagacggggtttttgaggaggattcgcaaattgacatagccacagtacaggatatgcttagcagccaccattacaagtcattcaaagtcagcatgatccacagactgcgattcacaaccgacgtacagctaggtatctctggagacaaagtagagatagaccctgttacgaatcagaaagccagcactaagttttggattaagcagaaacccatctcaatcgattccgacctgctctgtgcctgtgaccttgctgaagagaaaagccccagtcacgcaatatttaaactcacgtatctaagcaatcacgactataaacacctctactttgaatcggacgctgctaccgtcaatgaaattgtgctcaaggttaactacatcctggaatcgcgagctagcactgcccgggctgactactttgctcaaaaacaaagaaaactgaacagacgtacgagcttcagcttccagaaggagaagaaatccgggcagcagtgacactggcctccagcctcaatctgttccgtagctcagagcctgcctgccagggccaagtgccctagagtccacccggtgtcctgaagtcctcggggggaggccagcccctggctcactggcacagggcaggtgggctctcggggaaggtgtcgggggccccctaggagggagcgctggggacattgccatgggacggaagtctgcttggcagtggctttgataagcgatgcttgggggtcagaccaccccctagaggagccacgtgccgcccagccaccttcaatgcctgccaccctgcccgaggatgtacagagccgtgcccacacatttccttgcaacttgatcaaatttcttaaagcaaacaacaaaaatgtacatttctgtttttccttttaataaacaggtgtactctttatcatggttggtatgatggaccattctttggggcggaggattgattatgttactctctttaaaatctgttcccatattgaacaggcagattggaaaagctatggttcgatttctcagaagaaatgtttaggtcttagtcaatagttttaactatgccatttgtttaaatgagtgcatttgcttcgagggtagtgtcttactaaaagttaggaacagagacctagtggtgtgtccaaggccgtgtcactttccccttcagcacaccccagcttctgacctcagagcccaggagctgcgtggacagtgtggggtgccaggaggaggggcggtggctggtcctcaggcacgctgcactcccagccagacatggtctttccgtttcttaagtagcaagtgtaggtttcagctggcagttccacctgcatgttctctgcttcgctgccttggaaggggccacattccccattcctcttctccttacagcgcctgcctcctttttcaagcaggcggaaagctgctgtttctcacgtttcagggagaggggtgagcggagggagacctgtgtccgtgccgtccggctccctgggtgggaacaggcaagggatcagatgcccctgacaccacgcctctggccacaccagatgcctctgcagtcctcgacagcctcttcagtgtccctcctgcggtgatgtccttactgtccccagccagggccggggaccggtgtttcactgaggacctgcattagaaacattttttaaattgttgtacaggaagagatgtgtctaaaacagcatcttaaagctgagtgtatttctttgcacaaggggtcatgctgatgaattcttctttcattctgatctttgttcagccaacaggagcgtccttttctaatgtcttccattcctaccccccacccaaaaacaaaagaaatatttgtagcttgctatctgtatttgaatttttagcaattttatatttagatactttgaaaaatgtaaatgactaatttggtcattaaatcttgtgacatattcgatattaaaatgatattaaaataaaagtcatataaatacaca

SEQ ID NO: 165 - protein, 522 aa, Homo sapiens
MAFLDNPTIILAHIRQSHVTSDDTGMCEMVLIDHDVDLEKIHPPSMPGDSGSEIQGSNGETQGYVYAQSVDITSSWDFGIRRRSNTAQRLERLRKERQNQIKCKNIQWKERNSKQSAQELKSLFEKKSLKEKPPISGKQSILSVRLEQCPLQLNNPFNEYSKFDGKGHVGTTATKKIDVYLPLHSSQDRLLPMTVVTMASARVQDLIGLICWQYTSEGREPKLNDNVSAYCLHIAEDDGEVDTDFPPLDSNEPIHKFGFSTLALVEKYSSPGLTSKESLFVRINAAHGFSLIQVDNTKVTMKEILLKAVKRRKGSQKVSGPQYRLEKQSEPNVAVDLDSTLESQSAWEFCLVRENSSRADGVFEEDSQIDIATVQDMLSSHHYKSFKVSMIHRLRFTTDVQLGISGDKVEIDPVTNQKASTKFWIKQKPISIDSDLLCACDLAEEKSPSHAIFKLTYLSNHDYKHLYFESDAATVNEIVLKVNYILESRASTARADYFAQKQRKLNRRTSFSFQKEKKSGQQ

SEQ ID NO: 166 - DNA, 4581 bp, Homo sapiens
  source 1..4581: mol_type = other DNA
gagggaacgctccaggtaaagcgctgggggaggaagcgacgccgaggagctacggtttcctccagaggtctccgcccctctgcccctatattcccagagctcgagtctgatccgggccttgccgggcaccctggaaaggcgggggtgatagtacagatggagacgcaactgcagagcattttcgaagaggtggtgaaaacggaagttatagaagaggcttttcctggcatgtttatggatactcctgaagatgagaaaacaaaactaattagctgtttgggggccttcagacagttttggggtggtctttctcaggagtctcatgaacagtgtatccagtggattgttaagtttattcatggtcagcatagtcctaaaagaatttcttttctttatgactgcttagcaatggcagttgagactggtctccttccacccaggctggtttgtgaatccctgataaactctgacactcttgagtgggaaagaacacagctttgggccttaacatttaaactggttcggaaaataattgggggagtggattacaagggtgttcgagatctcttaaaagtgattttggagaagattttgacaattcctaatacagtgagctctgctgttgtacagcagcttctggcagcaagagaggttatagcatatatcttggaaagaaatgcctgcttattaccagcctattttgcagtcactgagatcaggaaactgtatcctgaaggcaaacttccacactggttacttggaaacctagtatcagactttgtggataccttcaggcccacagcaaggataaactccatttgtggtcgctgtagtcttctgccagttgtaaataattcgggtgccatttgtaattcatggaaactggatcctgctactcttcgttttcctttgaaaggccttttgccatatgataaggatctgtttgaaccacagactgctttgttgagatatgtattggagcagccttattccagggatatggtctgcaatatgctaggtttaaataagcagaccttgaacattgctcagcacaagcagcgctgccctgtgctggaggaccagttggtggatctggttgtttatgccatggagcgatctgagaccgaggagaagtttgacgatgggggaacaagccaactcctgtggcagcatctctcaagtcagctcattttctttgtgcttttccagtttgcaagttttccacatatggtgctttctcttcatcagaagttagcagggcgaggactgattaaaggcagagatcatcttatgtgggttctcctgcaattcatttctggaagtattcagaaaaatgcactagctgattttctccctgtgatgaagctcttcgacttgctatacccagaaaaagaatatatcccagttcctgatattaacaaaccccagtcaacccatgcctttgcaatgacctgtatttggattcatctcaatagaaaagctcaaaatgacaactccaagctacagattccaatacctcattccctaagacttcaccatgagttcctgcagcagagtctaagaaataaaagtttacagatgaatgactataagattgctctattgtgtaatgcatactctacaaattcagaatgttttacattacccatgggagctctggtagaaactatttatggaaatggaattatgaggatacctctccctggaacaaactgtatggcttcaggatctattacccccttacctatgaacctcctggattcactgacagttcatgccaaaatgagccttattcacagcattgcaaccagggtgataaaacttgctcatgcaaagtccagtgtggccttggctccagccctagtggaaacttacagtcgtttattggtctatatggaaatagagtctttgggcatcaaaggatttatcagtcagcttttgccaactgttttcaaatcacatgcatgggggatcttacacacactccttgagatgtttagctaccggatgcatcatattcagcctcattacagagttcagctcctgagtcatcttcatactttggctgcagttgcacaaacaaaccagaaccagctccatctttgtgtcgagagcactgctctcaggcttataacagcattaggtagctcagaggtacaaccgcagtttacacgcttccttagtgatcccaaaacagtgctctcagcagaatctgaagaactgaaccgagccttgatattgaccttggctagagcaactcatgtaacagatttttttacaggctctgattcaattcagggaacttggtgtaaagacatacttcagaccatcatgagtttcactcctcataattgggcttcacacaccctgagctgttttccaggcccactacaggcattcttcaaacaaaataatgtgcctcaggaaagccgttttaatctgaaaaaaaatgtggaggaggagtataggaagtggaagtcaatgagcaacgaaaacgacattattacccacttctctatgcagggctcccctcctctctttctttgtcttctctggaaaatgctcttggaaacagatcatattaatcagattggctatagagtattagagagaattggagccagggccttggtagcccatgtgaggacatttgcagatttcctggtatatgagttttctacatcagcagggggtcagcaactcaataaatgcattgaaattcttaatgacatggtatggaagtataacattgttacactggacagattaattctctgcctggccatgcgtagtcacgaaggaaatgaagcccaggtttgttatttcataattcagttgctgttactcaaaccaaacgattttagaaatcgagtaagtgactttgtgaaggaaaattccccagagcactggttacagaatgactggcacaccaagcacatgaattatcacaagaaatatccagagaagttgtattttgagggcctcgcggaacaggtggatcctcctgtacagatccagtctccctatctgcccatctattttgggaatgtgtgtcttcgattccttccagtatttgatatagtaatccacagatttttagagttgcttccggtatccaaatcactggagactctactggatcatctaggaggcttatataaatttcatgatcgtccagtgacttatctgtataacactctgcactattatgaaatgcacctgagagaccgcgcatttctcaaacgaaaactcgtccatgcgatcattggctctctgaaggataatcgaccgcagggctggtgtctaagtgacacttacctgaaatgcgctatgaatgcacgagaggaaaatccttgggttccagatgacacctactattgcagattgattggcagactagtcgatacgatggctggcaaatctcctggtccctttccaaactgtgactggagattcaatgagtttcccaacccagctgcccatgctctccatgttacttgtgtggagctcatggccttggcagtttcaggcaaagaagttgggaatgcccttctaaatgttgtcctaaaaagtcagcctttagtgccaagagagaacattacagcatggatgaatgcaattggtttgatcatcactgccctaccagagccatattggattgttcttcatgatcgaattgtgagtgtcatcagcagccccagcttgacgtctgaaacagagtgggttggctatccattccgcctctttgatttcactgcctgtcatcagtcctactctgagatgagttgtagctatacgttagctcttgcacatgctgtgtggcaccattctagcatcggacaactttctctcattccaaagtttcttactgaagtacttcttcctatagtgaagaccgaattccagttgctttatgtataccatcttgttggaccatttttacaaagatttcagcaagagagaactcgttgtatgatagagattggtgtggcgttttatgacatgctgctgaatgttgaccagtgtagcacccatttaaattacatggatcccatctgtgacttcctctatcacatgaagtatatgtttactggtgacagcgtgaaagagcaagtagagaagattatctgtaacttaaaaccagctttaaaacttcgtcttcgattcatcacacacattagcaagatggagccagctgcagtgcctccacaagccatgaacagtgggtctccagcacctcagtctaatcagtaaaaagtcagagtacacagcaagggttccaaattaagaggaagcaaaacgctgcccagatcctgagaaacctggagaaaatcaaccttagtagtttcaactcatacattgtcttgtttgattttgttctttgttttttatcctctttaagcacagatgcgtgttgaagtctaaggtgttctgtcatcacactctctttactagaataagtgtgcccaggcagaaaaaaaagtgtattcaatgttgctggcatgtgtggattcacagctcgtggctgtaaggaaatctgggggtttcataaatccattaaaatccttttagagttgccaa

SEQ ID NO: 167 - protein, 1365 aa, Homo sapiens
METQLQSIFEEVVKTEVIEEAFPGMFMDTPEDEKTKLISCLGAFRQFWGGLSQESHEQCIQWIVKFIHGQHSPKRISFLYDCLAMAVETGLLPPRLVCESLINSDTLEWERTQLWALTFKLVRKIIGGVDYKGVRDLLKVILEKILTIPNTVSSAVVQQLLAAREVIAYILERNACLLPAYFAVTEIRKLYPEGKLPHWLLGNLVSDFVDTFRPTARINSICGRCSLLPVVNNSGAICNSWKLDPATLRFPLKGLLPYDKDLFEPQTALLRYVLEQPYSRDMVCNMLGLNKQTLNIAQHKQRCPVLEDQLVDLVVYAMERSETEEKFDDGGTSQLLWQHLSSQLIFFVLFQFASFPHMVLSLHQKLAGRGLIKGRDHLMWVLLQFISGSIQKNALADFLPVMKLFDLLYPEKEYIPVPDINKPQSTHAFAMTCIWIHLNRKAQNDNSKLQIPIPHSLRLHHEFLQQSLRNKSLQMNDYKIALLCNAYSTNSECFTLPMGALVETIYGNGIMRIPLPGTNCMASGSITPLPMNLLDSLTVHAKMSLIHSIATRVIKLAHAKSSVALAPALVETYSRLLVYMEIESLGIKGFISQLLPTVFKSHAWGILHTLLEMFSYRMHHIQPHYRVQLLSHLHTLAAVAQTNQNQLHLCVESTALRLITALGSSEVQPQFTRFLSDPKTVLSAESEELNRALILTLARATHVTDFFTGSDSIQGTWCKDILQTIMSFTPHNWASHTLSCFPGPLQAFFKQNNVPQESRFNLKKNVEEEYRKWKSMSNENDIITHFSMQGSPPLFLCLLWKMLLETDHINQIGYRVLERIGARALVAHVRTFADFLVYEFSTSAGGQQLNKCIEILNDMVWKYNIVTLDRLILCLAMRSHEGNEAQVCYFIIQLLLLKPNDFRNRVSDFVKENSPEHWLQNDWHTKHMNYHKKYPEKLYFEGLAEQVDPPVQIQSPYLPIYFGNVCLRFLPVFDIVIHRFLELLPVSKSLETLLDHLGGLYKFHDRPVTYLYNTLHYYEMHLRDRAFLKRKLVHAIIGSLKDNRPQGWCLSDTYLKCAMNAREENPWVPDDTYYCRLIGRLVDTMAGKSPGPFPNCDWRFNEFPNPAAHALHVTCVELMALAVSGKEVGNALLNVVLKSQPLVPRENITAWMNAIGLIITALPEPYWIVLHDRIVSVISSPSLTSETEWVGYPFRLFDFTACHQSYSEMSCSYTLALAHAVWHHSSIGQLSLIPKFLTEVLLPIVKTEFQLLYVYHLVGPFLQRFQQERTRCMIEIGVAFYDMLLNVDQCSTHLNYMDPICDFLYHMKYMFTGDSVKEQVEKIICNLKPALKLRLRFITHISKMEPAAVPPQAMNSGSPAPQSNQ

SEQ ID NO: 168 - DNA, 3456 bp, Homo sapiens
  source 1..3456: mol_type = other DNA
aagtgccaaaatggcgatgcctaccacctagaactggattgtgcgctccatttctttcacctcaaagctggccgccaccgctgccacctgctcagagtgaaataatgaaggtggtcaacctgaagcaagccattttgcaagcctggaaggagcgctggagtgactaccaatgggcaatcaacatgaagaaattctttcctaaaggagccacctgggatattctcaacctggcagatgcgttactagagcaggccatgattggaccatcccccaatcctctcatcttgtcctacctgaagtatgccattagttcccagtttgatgacttttctcgggacctgtgtgtccaggcattgctggacatcatggacatgttttgtgaccgtctgagctgtcacggcaaagcagaggaatgcatcggactgtgccgagcccttcttagcgccctccactggctgctgcgctgcacggcagcctctgcagagcggctgcgggaggggctggaggccggcactccagccgctggggagaagcagcttgccatgtgccttcagcgcctggagaaaaccctcagcagcaccaagaaccgggccctgctgcacatcgccaaactagaggaggcctcttcttggactgccatcgagcattctctcttgaaacttggagagatcctggccaatctcagcaacccgcagctccggagtcaggccgagcagtgtggcaccctcattaggagcatccccacgatgctgtctgtgcatgcggagcagatgcacaagaccggcttccccactgtccacgccgtgatcctgctcgagggcaccatgaacctgacaggcgagacgcagtccctggtggagcagctgacgatggtgaagcgcatgcagcatatccccaccccactttttgtcctggagatctggaaagcttgcttcgtggggctcattgagtctcccgagggtacggaggagctcaagtggacagctttcactttcctcaagattccacaggttttggtgaagttgaagaagtactctcatggagacaaggacttcactgaggatgtcaactgtgcttttgagttcctgctgaagctcacccccttgttggacaaagctgaccagcgctgcaactgtgactgtacaaacttcctgctccaagaatgtggcaagcaggggcttctgtctgaggccagcgtcaacaaccttatggctaagcgcaaagcggaccgagagcacgcaccccagcagaaatcgggagagaatgccaacatccagcccaacatccagctgatcctccgggcggagcccactgtcacaaacatcctcaagacgatggatgcagaccactctaagtcaccggagggactgctgggagtcctgggccacatgctgtccgggaagagtctggacttgctgctggctgccgccgccgccactggaaagctgaaatccttcgcccggaaattcatcaatttgaatgaattcacaacctatggcagcgaagaaagcaccaaaccggcctccgtccgggccctgctgtttgacatctccttcctcatgctgtgccatgtggcccagacctatggttcagaggtgattctgtccgagtcgcgcacaggagctgaggtgcccttcttcgagacctggatgcagacctgcatgcctgaggagggcaagatcctgaaccctgaccacccctgcttccgccccgactccaccaaagtggagtccctggtggccctgctcaacaactcctcggagatgaagctagtgcagatgaagtggcatgaggcctgtctcagcatctcagccgccatcttggaaatcctcaatgcctgggagaatggggtcctggccttcgagtccatccagaaaatcactgataacatcaaagggaaggtatgcagtctggcggtgtgtgctgtggcttggcttgtggcccacgtccggatgctggggctggatgagcgtgagaagtcgctgcagatgatccgccagctggcagggccactgtttagtgagaacaccctgcagttctacaatgagagggtggtgatcatgaactcgatcctggagcgcatgtgtgccgacgtgctgcagcagacagccacgcagatcaagtttccctccaccggggtggacacaatgccctactggaacctgctgccccccaagcggcccatcaaagaggtgctgacggacatttttgccaaggtgctggagaagggctgggtggacagccgctccatccacatctttgacaccctgctgcacatgggcggcgtctactggttctgcaacaacctgattaaggagctgctgaaggagacgcggaaggagcacacgctgcgggcagtggagctgctctactccatcttctgcctggacatgcagcaagtgaccctggtcctgctgggccacatcctacctggcctgctcactgactcctccaagtggcacagcctcatggaccccccgggcactgctcttgccaagctggccgtgtggtgtgccctcagttcctactcctcccacaagggacaggcgtccacccgccagaagaagagacaccgcgaagacattgaggattatatcagcctcttccccctggacgatgtgcagccttcgaagttgatgcgactgctgagctctaatgaggacgatgccaacatcctttcgagccccacagaccgatccatgagcagctccctctcagcctctcagctccacacggtcaacatgcgggaccctctgaaccgagtcctggccaacctgttcctgctcatctcctccatcctggggtctcgcaccgctggcccccacacccagttcgtgcagtggttcatggaggagtgtgtggactgcctggagcagggtggccgtggcagcgtcctgcagttcatgcccttcaccaccgtgtcggaactggtgaaggtgtcagccatgtccagccccaaggtggttctggccatcacggacctcagcctgcccctgggccgccaggtggctgctaaagccattgctgcactctgaggggcttggcatggccgcagtgggggctggggactggcgcagccccaggcgcctccaagggaagcagtgaggaaagatgaggcatcgtgcctcacatccgctccacatggtgcaagagcctctagcggcttccagttccccgctcctgactcctgacctccaggatgtctcccggtttcttctttcaaaatttcctctccatctgctggcacctgaggagagtgagcagcctggaccacaagcccagtggtcacccctgtgtgcgcccgccccagcccaggagtagtcttacctctgaggaactttctagatgcaaagtgtgtatgtgtgtgtgtgtgtgtgtgtgtgtgtgtttgtgtgtattttgtaatatgtgagggaaatctaccttcgttcatgtataaataaagctcctcgtggc

SEQ ID NO: 169 - protein, 976 aa, Homo sapiens
MKVVNLKQAILQAWKERWSDYQWAINMKKFFPKGATWDILNLADALLEQAMIGPSPNPLILSYLKYAISSQFDDFSRDLCVQALLDIMDMFCDRLSCHGKAEECIGLCRALLSALHWLLRCTAASAERLREGLEAGTPAAGEKQLAMCLQRLEKTLSSTKNRALLHIAKLEEASSWTAIEHSLLKLGEILANLSNPQLRSQAEQCGTLIRSIPTMLSVHAEQMHKTGFPTVHAVILLEGTMNLTGETQSLVEQLTMVKRMQHIPTPLFVLEIWKACFVGLIESPEGTEELKWTAFTFLKIPQVLVKLKKYSHGDKDFTEDVNCAFEFLLKLTPLLDKADQRCNCDCTNFLLQECGKQGLLSEASVNNLMAKRKADREHAPQQKSGENANIQPNIQLILRAEPTVTNILKTMDADHSKSPEGLLGVLGHMLSGKSLDLLLAAAAATGKLKSFARKFINLNEFTTYGSEESTKPASVRALLFDISFLMLCHVAQTYGSEVILSESRTGAEVPFFETWMQTCMPEEGKILNPDHPCFRPDSTKVESLVALLNNSSEMKLVQMKWHEACLSISAAILEILNAWENGVLAFESIQKITDNIKGKVCSLAVCAVAWLVAHVRMLGLDEREKSLQMIRQLAGPLFSENTLQFYNERVVIMNSILERMCADVLQQTATQIKFPSTGVDTMPYWNLLPPKRPIKEVLTDIFAKVLEKGWVDSRSIHIFDTLLHMGGVYWFCNNLIKELLKETRKEHTLRAVELLYSIFCLDMQQVTLVLLGHILPGLLTDSSKWHSLMDPPGTALAKLAVWCALSSYSSHKGQASTRQKKRHREDIEDYISLFPLDDVQPSKLMRLLSSNEDDANILSSPTDRSMSSSLSASQLHTVNMRDPLNRVLANLFLLISSILGSRTAGPHTQFVQWFMEECVDCLEQGGRGSVLQFMPFTTVSELVKVSAMSSPKVVLAITDLSLPLGRQVAAKAIAAL

SEQ ID NO: 170 - DNA, 3312 bp, Homo sapiens
  source 1..3312: mol_type = other DNA
acactttaatatcaacctgtttcctcctcctccttctcctcctcctccgtgacctcctcctcctctttctcctgagaaacttcgccccagcggtgcggagcgccgctgcgcagccggggagggacgcaggcaggcggcgggcagcgggaggcggcagcccggtgcggtccccgcggctctcggcggagccccgcgcccgccgcgccatggcccgaagaccccggcacagcatatatagcagtgacgaggatgatgaggactttgagatgtgtgaccatgactatgatgggctgcttcccaagtctggaaagcgtcacttggggaaaacaaggtggacccgggaagaggatgaaaaactgaagaagctggtggaacagaatggaacagatgactggaaagttattgccaattatctcccgaatcgaacagatgtgcagtgccagcaccgatggcagaaagtactaaaccctgagctcatcaagggtccttggaccaaagaagaagatcagagagtgatagagcttgtacagaaatacggtccgaaacgttggtctgttattgccaagcacttaaaggggagaattggaaaacaatgtagggagaggtggcataaccacttgaatccagaagttaagaaaacctcctggacagaagaggaagacagaattatttaccaggcacacaagagactggggaacagatgggcagaaatcgcaaagctactgcctggacgaactgataatgctatcaagaaccactggaattctacaatgcgtcggaaggtcgaacaggaaggttatctgcaggagtcttcaaaagccagccagccagcagtggccacaagcttccagaagaacagtcatttgatgggttttgctcaggctccgcctacagctcaactccctgccactggccagcccactgttaacaacgactattcctattaccacatttctgaagcacaaaatgtctccagtcatgttccataccctgtagcgttacatgtaaatatagtcaatgtccctcagccagctgccgcagccattcagagacactataatgatgaagaccctgagaaggaaaagcgaataaaggaattagaattgctcctaatgtcaaccgagaatgagctaaaaggacagcagacacagaaccacacatgcagctaccccgggtggcacagcaccaccattgccgaccacaccagacctcatggagacagtgcacctgtttcctgtttgggagaacaccactccactccatctctgccagcggatcctggctccctacctgaagaaagcgcctcgccagcaaggtgcatgatcgtccaccagggcaccattctggataatgttaagaacctcttagaatttgcagaaacactccaatttatagattctttcttaaacacttccagtaaccatgaaaactcagacttggaaatgccttctttaacttccacccccctcattggtcacaaattgactgttacaacaccatttcatagagaccagactgtgaaaactcaaaaggaaaatactgtttttagaaccccagctatcaaaaggtcaatcttagaaagctctccaagaactcctacaccattcaaacatgcacttgcagctcaagaaattaaatacggtcccctgaagatgctacctcagacaccctctcatctagtagaagatctgcaggatgtgatcaaacaggaatctgatgaatctggaattgttgctgagtttcaagaaaatggaccacccttactgaagaaaatcaaacaagaggtggaatctccaactgataaatcaggaaacttcttctgctcacaccactgggaaggggacagtctgaatacccaactgttcacgcagacctcgcctgtggcagatgcaccgaatattcttacaagctccgttttaatggcaccagcatcagaagatgaagacaatgttctcaaagcatttacagtacctaaaaacaggtccctggcgagccccttgcagccttgtagcagtacctgggaacctgcatcctgtggaaagatggaggagcagatgacatcttccagtcaagctcgtaaatacgtgaatgcattctcagcccggacgctggtcatgtgagacatttccagaaaagcattatggttttcagaacacttcaagttgacttgggatatatcattcctcaacatgaaacttttcatgaatgggagaagaacctatttttgttgtggtacaacagttgagagcagcaccaagtgcatttagttgaatgaagtcttcttggatttcacccaactaaaaggatttttaaaaataaataacagtcttacctaaattattaggtaatgaattgtagccagttgttaatatcttaatgcagatttttttaaaaaaaacataaaatgatttatctgtattttaaaggatccaacagatcagtattttttcctgtgatgggttttttgaaatttgacacattaaaaggtactccagtatttcacttttctcgatcactaaacatatgcatatatttttaaaaatcagtaaaagcattactctaagtgtagacttaataccatgtgacatttaatccagattgtaaatgctcatttatggttaatgacattgaaggtacatttattgtaccaaaccattttatgagttttctgttagcttgctttaaaaattattactgtaagaaatagttttataaaaaattatatttttattcagtaatttaattttgtaaatgccaaatgaaaaacgttttttgctgctatggtcttagcctgtagacatgctgctagtatcagaggggcagtagagcttggacagaaagaaaagaaacttggtgttaggtaattgactatgcactagtatttcagactttttaattttatatatatatacattttttttccttctgcaatacatttgaaaacttgtttgggagactctgcattttttattgtggtttttttgttattgttggtttatacaagcatgcgttgcacttcttttttgggagatgtgtgttgttgatgttctatgttttgttttgagtgtagcctgactgttttataatttgggagttctgcatttgatccgcatcccctgtggtttctaagtgtatggtctcagaactgttgcatggatcctgtgtttgcaactggggagacagaaactgtggttgatagccagtcactgccttaagaacatttgatgcaagatggccagcactgaacttttgagatatgacggtgtacttactgccttgtagcaaaataaagatgtgcccttattttaccta

SEQ ID NO: 171 - protein, 637 aa, Homo sapiens
MARRPRHSIYSSDEDDEDFEMCDHDYDGLLPKSGKRHLGKTRWTREEDEKLKKLVEQNGTDDWKVIANYLPNRTDVQCQHRWQKVLNPELIKGPWTKEEDQRVIELVQKYGPKRWSVIAKHLKGRIGKQCRERWHNHLNPEVKKTSWTEEEDRIIYQAHKRLGNRWAEIAKLLPGRTDNAIKNHWNSTMRRKVEQEGYLQESSKASQPAVATSFQKNSHLMGFAQAPPTAQLPATGQPTVNNDYSYYHISEAQNVSSHVPYPVALHVNIVNVPQPAAAAIQRHYNDEDPEKEKRIKELELLLMSTENELKGQQTQNHTCSYPGWHSTTIADHTRPHGDSAPVSCLGEHHSTPSLPADPGSLPEESASPARCMIVHQGTILDNVKNLLEFAETLQFIDSFLNTSSNHENSDLEMPSLTSTPLIGHKLTVTTPFHRDQTVKTQKENTVFRTPAIKRSILESSPRTPTPFKHALAAQEIKYGPLKMLPQTPSHLVEDLQDVIKQESDESGIVAEFQENGPPLLKKIKQEVESPTDKSGNFFCSHHWEGDSLNTQLFTQTSPVADAPNILTSSVLMAPASEDEDNVLKAFTVPKNRSLASPLQPCSSTWEPASCGKMEEQMTSSSQARKYVNAFSARTLVM

SEQ ID NO: 172 - DNA, 12223 bp, Homo sapiens
  source 1..12223: mol_type = other DNA
ggcggcggcggtggcggcggcggcagcggaggcagcatcgcgggccgccgaagtggctgcggcggcggcggcgacccctaggaccccgggcaggtggagcgctcgcggctgctcgcggcgagcccgggagtgatggcgaggcccctgcgggcggccagcgcctgaggcgccccgccccgccccgccccgcgcggccctccccgcccggccctgccctgccctgctccctgccggcggctgcgggcgcttcctagtccgctcgggcggccgcccaggcgaggtgcggcctccgcacaggcggggggcgtaggcgcgcggggcccgccatggctgcgtcggagctctacacaaagtttgccagggtttggatacctgatccagaggaagtctggaagtcagcagagctgctcaaagattataagccaggagataaagtcctcctgcttcacctcgaggaaggaaaggatttggaataccatctagatccaaagaccaaggagctgcctcacttacgaaatcctgacatacttgttggtgaaaatgacctcacagccctcagctatcttcatgagcctgctgtgctccataatctcagagtccgctttattgattccaaacttatttatacgtattgtggtatagtcctagtagctataaatccctatgaacagctgcctatttatggagaagatattattaatgcatacagtggtcagaacatgggtgatatggatccacatatctttgcagtagctgaagaagcttacaagcaaatggccagagatgaacgaaatcagtccatcatcgtaagtggagagtctggggcaggaaaaacagtctcagctaagtatgccatgcgatactttgcaactgtgagtggttctgccagtgaggccaatgtggaggaaaaggtcttggcctccaaccccatcatggagtccattggaaatgctaaaacaaccaggaatgataatagcagccgttttgggaagtatattgagattggttttgataagagatatcgaatcattggtgccaatatgagaacttatcttttagagaaatccagagtggtattccaggcagaagaggagagaaactatcatatcttctatcagctttgtgcctcagcaaagttacctgaatttaaaatgctacgattaggaaatgcagataactttaattacacaaaacaaggaggcagtcctgtgattgaaggagtggatgatgcaaaggagatggcacatactaggcaggcctgcactttgctaggaattagtgaatctcatcaaatgggaattttccgaatacttgctggcatccttcacttaggcaatgttggatttacatcccgagatgcagacagctgcacaatacctcccaagcatgaacctctctgcatcttctgtgaactcatgggtgtggactatgaggagatgtgtcactggctctgccatcggaaactggctactgccacagagacatacatcaagcccatctccaagctgcaggccacgaatgcccgcgatgctttggccaagcacatctatgccaagctctttaactggattgtagataatgtcaatcaggctctccattctgctgtcaaacagcactcttttattggtgtgctagacatttacggatttgaaacatttgagataaatagttttgaacagttttgcataaattatgcaaatgaaaaactacagcaacaattcaatatgcatgtcttcaaattggagcaagaagaatatatgaaggaacaaattccatggacactcatagatttttatgataatcagccttgtattaatcttatagaatcaaaactaggcattctagatttactggatgaggaatgcaagatgcctaaaggcacagatgacacctgggcccaaaaattgtacaacacacatttgaacaaatgtgcactctttgaaaagcctcgtctatcaaacaaagctttcatcatccaacattttgctgacaaagtggaataccagtgtgaaggatttctcgaaaagaataaagacaccgtttttgaagaacaaattaaagttcttaaatcaagcaagtttaagatgctaccagaactatttcaagatgatgagaaggccatcagtccaacttcagccacctcctcagggcgcacacccctcacacgaactcctgcaaagcccaccaaaggcagaccaggccaaatggccaaagagcacaagaaaacagtggggcatcagttcagaaactccctgcacctgcttatggagacactcaatgccactacccctcactatgtgcgctgtatcaagcctaatgacttcaagttcccattcacgtttgatgagaagagggcagtgcagcagctgagagcatgtggtgtcctggaaaccatccgaatcagtgcggccggtttcccctcacggtggacttaccaagaatttttcagccgctaccgtgtcctaatgaagcagaaagatgtgctgagtgacagaaagcaaacatgcaagaatgtgttagagaaactgatactggacaaggacaaataccagtttggtaagacaaagatctttttccgtgccggtcaagtggcctatctagaaaaattgagagctgacaaactgagagctgcctgcatccggatccagaagaccatccgagggtggctgctgagaaagaagtacctacgcatgcggaaggcagccatcaccatgcagagatacgtgcggggctaccaggcccgatgctatgctaagtttctgcgcagaaccaaggcagcaaccatcattcaaaagtactggcgcatgtatgtggtccgcaggaggtacaagattagacgagctgccactatcgttcttcagtcttacttgcgaggcttcttggccagaaataggtatcgcaagatactccgtgagcacaaagcagtcatcattcagaagcgagtccggggctggctggcccgcacacactacaagaggagcatgcatgccatcatctaccttcagtgctgcttcaggcggatgatggccaagcgtgagctaaagaagctcaaaatcgaggctcgctcagtggagcgctataagaagctgcacatcggcatggagaacaagatcatgcagctgcagcgcaaagttgatgagcagaacaaagactacaaatgccttgtggagaaactaaccaatctggaaggaatatacaactctgagactgagaaactacgaagtgacttagaacgtcttcaactaagtgaagaggaagcgaaagttgccactgggcgggtccttagtctgcaggaagaaattgccaagctccggaaagacctggagcaaactcgttcagagaaaaaatgcattgaggaacatgcagatcgatacaaacaagaaacagagcagctggtatcaaatctgaaggaagaaaatactttgctgaagcaagaaaaagaagccctcaatcaccgcatcgtgcagcaggctaaggagatgacagaaactatggagaagaagttagtagaagaaacgaaacaactggaactcgaccttaatgatgaaaggctgagatatcagaaccttctgaatgagttcagtcgcctggaagaaagatatgatgacctcaaggaagagatgacccttatggtgcatgtgcctaagcctggacacaagagaacagactccacccacagcagcaacgagtctgaatatatctttagctctgaaattgcagaaatggaagacattccatcaaggacagaggaaccaagtgagaagaaggtacctctggacatgtcattgttccttaagctccagaagcgggtcacagagctggagcaggagaagcaggtgatgcaggatgagctggaccgcaaggaggagcaggtgctccgcagcaaggccaaggaagaagaaagaccacaaattagaggtgcagaactggaatatgagtcactcaagcgtcaagaactagaatcagaaaacaaaaaactgaagaatgagctaaatgagttgcgcaaggccctcagtgagaaaagtgccccagaggtgaccgccccaggtgcacctgcctaccgtgtcctcatggagcagctgacctctgtgagcgaggagcttgatgtccgcaaggaggaagtcctcatcttaaggtctcaactggtgagccagaaagaggccatccaacccaaggatgacaagaatacaatgacagattccacaatacttttggaagatgtacaaaaaatgaaagataaaggtgaaatagcacaagcatacattggtttgaaagaaacaaataggctcctggaatcccagctgcagtcacagaagaggagccatgagaatgaggccgaggccctccgtggggagatccagagcctgaaggaggagaacaaccgacagcagcagctgctggcccagaacctgcagctgcccccagaggcccgcattgaggccagcctgcagcacgagatcacccggctgaccaacgaaaacttggatttgatggaacaacttgaaaaacaggataagacggtccgtaaactgaaaaaacaactgaaagtatttgccaaaaaaattggcgaactagaagtgggccagatggagaacatatccccaggacagatcattgatgaacccatccgaccagtcaacattcccaggaaagaaaaggatttccaagggatgctggaatacaagaaggaggatgagcaaaaacttgttaagaacctgattctggaactgaagccacgtggtgtagcagtcaatttgattccaggattaccggcatatatcctgttcatgtgtgttcgacatgctgactacctgaatgatgatcagaaagtaaggtcgttgctaacatcaacaattaacagcatcaaaaaagtattgaagaaaagaggtgatgattttgaaaccgtctccttctggctctctaacacatgccgatttttgcactgcttgaaacagtacagtggagaagagggctttatgaagcacaacacatctcgccagaatgaacactgcctcaccaattttgacctggctgagtatcggcaggtgctgagtgacttggccattcagatctaccagcagctcgtgcgggtgttagagaacatccttcagccaatgattgtctcaggcatgctggaacatgaaacgattcagggcgtgtctggggtgaagcccacagggttgagaaagcgaacctccagtatcgccgatgagggcacctacacactggactccatcctccggcagctcaactccttccactcggtcatgtgtcagcatggcatggaccctgaactgatcaagcaggtggtcaagcagatgttctacatcataggggccatcaccctgaacaaccttctcctgcggaaggacatgtgctcctggagtaaaggcatgcagatcaggtacaatgtcagtcaactggaagaatggctgcgtgacaagaatctgatgaatagtggggctaaagaaaccctggaacctctcattcaggctgctcaacttttgcaagtgaaaaagaaaacagatgatgatgcagaagccatttgttctatgtgcaatgctttaactactgcccagattgtgaaagtgttgaatttgtatactccagttaatgagtttgaagaaagagtctctgtgtcgttcattcgtactatacagatgcgtttacgagacaggaaagactctccccagctgctcatggatgctaaacacatctttcctgtcacctttcctttcaacccatcttccctcgcactagaaaccatccagattccagccagcctcggcctgggcttcatttcacgggtctgaaagtgatgtccaggcaaaaattgacaatacatttcttgcccgaaataagaacccattatttccagtgagttactgaaaatacatttttaaagagaaagtactgattatctcccaaatgagaagtcattaactggaaatctccctagaatactttcatcactttggaaacaaagataggctctttcgtgctgtgttatctttatagcaacactcatccttaaccaactaggtaccgtgagtttacatacaggagaatgatggaaggaagggaggaaggaaaggaggagaaaaatgtgtcttcagctggcagcatttattttaaatccttagcactgagtttgaatggtataaaaagtataacttccatagatgagctgttgttaggaaggcaccaaagaacctcctctgcactaaacaggagaatggaaagaaaagtctccattgagtacatatcatgtcagtttagtaatcaattatgttgatattgttaaactggttcaaagaaataaactggcaatatgtaaagtaattcctcatttgtgtcactatgatatagagatattaaaggaatgttggtttgctaaatagtatagatgtccatttgtactatagtttactgagcattttaaattgctgctacatactgtcttcttaaaatgtaagtgatattaggcactacaataagtttctcttgtcaattctgtttacaattcaatcagatcacagttttaactggattatatgcaaatacctacagattcacctgcacaagtagcagacactggaaagtcatgtagtaatatgacaaaatgcttgacatttaggggtaggattagacaaagtggctattgttgatgtcattatttattcaggatgtattacattgatgtgctcattaattttccctgggtggatattgcgtcagggtacagtgttctgtgaagtgacttatttttaactaccagatctgattccttcagtgcatattttcaaccttgacaggttttctctcttcttaatttattaagaattaatctcggctgggcgcggtggctcacgcctgtaatcccagcactttgggaagccaaggtgggcggatcacttcaggttaggagttggagaccagcctggccaacatggcgaaaccctgtctctactaaaaatacaaaaattagccgggcgtggtggcacttgcctgtaatcccagctactcgggaggctgaggcacgagaatcgattaaacctgggaggcggagattgcaatgagatcgaaccactgcactccagcctgggtgacagagagagacactgccttggaaaaaaaaagaatctcactcactatctagagaggattgtcagaatattcacgattcaggtcttgaaactttgattatgcaaaagaaggtatataataaatatttcattatgattcagtttttaaggctttgcagcttctataagtgttctcagatgccactagataattttaaaagcatcatattagaaatactttaagaagacttatataagaaatagaagattgttgaattttacagaggatttggttcattaagacccagattctgtaagttttcattctgaaattctagttaaacatattcaccatttttcttaggaatcttatacaataaatccttcaggttgcacaaaagcaaattattagttttcattagaaactctggttctgaattacaatcataggttatataaatttaactgttagatggtctataaatcttattaaaatatgtgcaatatttatggaagtcaaacagcttcatatcagtgataaagattgttattaaaagataaatactgtctgttaatttacatgggcctcaagttcctcgtttataaaataagagagttggacactgattcttaacatctcctccacatttaaaattctctcttctcagcccttagattctagagagaaaaagctgcagttactcagtaagtccattctctgatggaaagaccagtgtgtagtgcctgtcaattccttaggattaatcaaatgtaaaatcacaagtttgtgtagctgtaacctttcttaaatgtacatgatttatgtacatgcttttagaaggtcctactatatttgtattataattagtttaagtaatttttattacatcatgtattgctttattcagtttgaatacatttatttatttatttgcagtatcaaccagaaacactaccaattgcatcaaattctcccagtttttcctggttgtcaatgcggttttcaatgcacaattaagtcatagccatttggttcgtaccaaatgtgtcagaatctaacagcatccgataggctgtaagttggggagttgctaagaaaatgcaacgtggtacaggctgtccgcctcagccctggaaatctcccagacctcccccagcttcatcctgtgtagcacgactcaacgtgcaccctgaatcttctcaggtcttccaggtcatgctgtagctgtcactgccatgcagcccttttttttactccggacagctcatgtactgaagcgtcatgaaagaaaggctgtggtctgagcccttctctcccatctcctgtctttgtcctgtcaagtgctggagccagagctcctacagctgcccttggtggtttctcctgttcagcgatggtggcacaaaggttctgctattccagggctccagcttcctcccaggtctacccagagctccagatgggggtctgaattaacctctcttggtggcctggagatttttagtcattgacaagaataccttgtaaccagggaaccccaaggcccagtaaatgattctgtataccattttcttgaaggtacaagaagattctgccgactatggggatctttgggccagtttgaggattgctttccctctgaggttctttctctctgtcagccacactttctcacccaacttcagacacaccctgccagcctttcccctactcattcactcttccccttccctcaacttaatcgtctatcccgttgcctgctgtttgactgtgcactgaaggcaggtggatggagtcagtcctcagttgcccctgctggccttcctggtgcttaccatcagcccaatctttgcacagtccttgttgttcttacttctctgcatgcattccttcagaagatcagtcatcaactttttcttaattcctctgtgacacacaatgggaattcaaaggaagagatcttaaaagtcacaacagttctttatcttaataatcccctccccattcaccttactacatgcagactcacctcacacccttacaacttgaagctgaaaatttaaaagtaatttccctttttgcagcttttcctcaggttaaggctttgatctgcctgagagtaactctaaaaggagggaagataaatatgggataaaatccacaaagtgtagcttctaattcctttggaagtttaaaaaatttccacatatctgatgcttcttttgtcaggtgcagaagcacaaaaacatattccgaagccaactgatagggaatttggggattattgtcagtttggagaatttgctgtgttatttcttcatttccatggatagctcatagttggctctttctgggtgagtaattatgtgtaatatagatcaaatcttttactaaggttacagctacatgttaggggaggctatgaaaatactatattattataatttcagtgcagtgattgttgtgagaaataactttcatggtaaccctaggaaaatgggcacctgccaccatcctgagaagtcctcacacaatgccctttctctcttacacacacacacacacacatacacacacacacacccccgtcactaattcatagagttccttagcaggcatagtcaaggatcctctgggtaatgtcagctgcttagtgataaaacagagccaaaactagtgcatcctgttgaaagtaatgcagaaacagtacctgggtccagatatgctttcctgcggcgctttcctctgttacctcgtttcatcctcacagcagcatggacggtaggtggggtcgcttctacaatcatttctgatgatagcttgggaatagagataggggcagtgacttgcctgatgtcgcacagccctctggctgtcctgctttcccatatggagcagtggtggtgtgggcacctgtgatgcaggagactttaaaaatgtcgtgaggtcacgtgctgcccctcctggtacgtgtggaatgcccctggccagcaaggggtgcttttttatcagagttggcagctggcatgtgggaaccgagcaagtgctgcgtaccaagttacttgttttaaggagaccaagtgctcagcgccaggtggttttcttttttgtcatagttacttgctataactcagcttgacttctgtcatgaatcagtgctctctgggaggatgcaatactctgtttgggcattaattggtagcaggttgtctcaaccaaaaagacaggaaacagcaaaagcctctctgaaattaagaggaaagttactctccccacacccatcagagtctttattggagccaccaggtgagctgtgcagcctggacaggcctgcagctataggccaccttcccagtttaggtcctcagcacaggggagcccaagtcactgggtgccttccgagggctgtcactgggcaggccatatacaagtcagtgtgtgcgtgggcactgcagtgtgtgcatgccgtaggtgttgatgggtgctaggaggggtgtcgtgtgcatgcgcgttgaagaggatctgtattgccgtgacctctgttcatggatgagtgcattgtaatttgttctcaggctgtgctgtgagggccgccttaacccttgctcccttcccttctagagctgccttaagttctccagaacttttcttctgtaaaggatatcttgcctggaagggatatcttgccctgtttctcaaggttttgtgagagttttgactggatgtggccctgcatgaccctccttctcctgtacttcctctttcctttccaaatgggaattagaactgtggggcagcaacagtctcagagccagtgagaggccagcttagagaatgcttctgagttagtgggactctgtgtcacaagtaagcaaatgaatatatgaaagaaattatggagataagttagattcttggtaatacttaaatgtcttgctttctactaaccttttgttactaaaggtaaagggtataactcaaactttttgtggacattcttttcaaaattttttaagaaccctgtactataaaaggttgagtaaaaacaggaaagcgtgctataagttcaaatctgttgtattaccctaaattagataaaccaacctgaattatagtagatttctcaatagatgaggaactgaaaaatactatgtaaaatatcttccaaaatgctttttatactttttttatttgtaatttggtctatctaaaatgttcgttagcttaacttaatgggcgttattggattcatatgactaacgtttcctcagtattgtaatgcttgaaatatttgaaagaaaaaatgttgttttttagttgaaactggtatatataattcagtgcttggcaggttagtatatttttatgcatttttcagagtcagcagtttcaaatcttattgttatcatgttataaaattttagcccacatttcaggctccgtaaatcatttgagccattattttttcccaacaaatggtgaattttttctttaaatgtggatatatatgttgtaatttatgattcctggttatgtatttttgtgggatcctgcagtaaaattgacttttttgtgtctttgggagatttaaattgcgctaacagtgttgcgcaaaaatgagttcatgccatttaacatattgtattttaattattaactgtattaatttactatgaaatggacatccttttaactaaaatggaattgaacattgcagttttcaaatatttttccttgttgggtctggaaaaggaattctactttgatctgcatagaaaattttgatacaattttttgaaagttcttaggtgaaacatttacccattaaaaaggaagcagaaatactgagacatgaaaggcattatcaactaactctagactctagaacccattctagcatatctcacgtgcaatttttaaaaataagttaataattcatctcatatcaacaaaagcctttgaaacatgggttttcactagatatcacctagtgctaagataaaaaccaaaacaatatcagaattacatttatgctctaaatttgtagttgtccattgttgtgcttagtaaatgtgtgtcattaatgctgtattctcctagctattatggaaacttgtttaaataaagatatggatat

SEQ ID NO: 173 - protein, 1828 aa, Homo sapiens
MAASELYTKFARVWIPDPEEVWKSAELLKDYKPGDKVLLLHLEEGKDLEYHLDPKTKELPHLRNPDILVGENDLTALSYLHEPAVLHNLRVRFIDSKLIYTYCGIVLVAINPYEQLPIYGEDIINAYSGQNMGDMDPHIFAVAEEAYKQMARDERNQSIIVSGESGAGKTVSAKYAMRYFATVSGSASEANVEEKVLASNPIMESIGNAKTTRNDNSSRFGKYIEIGFDKRYRIIGANMRTYLLEKSRVVFQAEEERNYHIFYQLCASAKLPEFKMLRLGNADNFNYTKQGGSPVIEGVDDAKEMAHTRQACTLLGISESHQMGIFRILAGILHLGNVGFTSRDADSCTIPPKHEPLCIFCELMGVDYEEMCHWLCHRKLATATETYIKPISKLQATNARDALAKHIYAKLFNWIVDNVNQALHSAVKQHSFIGVLDIYGFETFEINSFEQFCINYANEKLQQQFNMHVFKLEQEEYMKEQIPWTLIDFYDNQPCINLIESKLGILDLLDEECKMPKGTDDTWAQKLYNTHLNKCALFEKPRLSNKAFIIQHFADKVEYQCEGFLEKNKDTVFEEQIKVLKSSKFKMLPELFQDDEKAISPTSATSSGRTPLTRTPAKPTKGRPGQMAKEHKKTVGHQFRNSLHLLMETLNATTPHYVRCIKPNDFKFPFTFDEKRAVQQLRACGVLETIRISAAGFPSRWTYQEFFSRYRVLMKQKDVLSDRKQTCKNVLEKLILDKDKYQFGKTKIFFRAGQVAYLEKLRADKLRAACIRIQKTIRGWLLRKKYLRMRKAAITMQRYVRGYQARCYAKFLRRTKAATIIQKYWRMYVVRRRYKIRRAATIVLQSYLRGFLARNRYRKILREHKAVIIQKRVRGWLARTHYKRSMHAIIYLQCCFRRMMAKRELKKLKIEARSVERYKKLHIGMENKIMQLQRKVDEQNKDYKCLVEKLTNLEGIYNSETEKLRSDLERLQLSEEEAKVATGRVLSLQEEIAKLRKDLEQTRSEKKCIEEHADRYKQETEQLVSNLKEENTLLKQEKEALNHRIVQQAKEMTETMEKKLVEETKQLELDLNDERLRYQNLLNEFSRLEERYDDLKEEMTLMVHVPKPGHKRTDSTHSSNESEYIFSSEIAEMEDIPSRTEEPSEKKVPLDMSLFLKLQKRVTELEQEKQVMQDELDRKEEQVLRSKAKEEERPQIRGAELEYESLKRQELESENKKLKNELNELRKALSEKSAPEVTAPGAPAYRVLMEQLTSVSEELDVRKEEVLILRSQLVSQKEAIQPKDDKNTMTDSTILLEDVQKMKDKGEIAQAYIGLKETNRLLESQLQSQKRSHENEAEALRGEIQSLKEENNRQQQLLAQNLQLPPEARIEASLQHEITRLTNENLDLMEQLEKQDKTVRKLKKQLKVFAKKIGELEVGQMENISPGQIIDEPIRPVNIPRKEKDFQGMLEYKKEDEQKLVKNLILELKPRGVAVNLIPGLPAYILFMCVRHADYLNDDQKVRSLLTSTINSIKKVLKKRGDDFETVSFWLSNTCRFLHCLKQYSGEEGFMKHNTSRQNEHCLTNFDLAEYRQVLSDLAIQIYQQLVRVLENILQPMIVSGMLEHETIQGVSGVKPTGLRKRTSSIADEGTYTLDSILRQLNSFHSVMCQHGMDPELIKQVVKQMFYIIGAITLNNLLLRKDMCSWSKGMQIRYNVSQLEEWLRDKNLMNSGAKETLEPLIQAAQLLQVKKKTDDDAEAICSMCNALTTAQIVKVLNLYTPVNEFEERVSVSFIRTIQMRLRDRKDSPQLLMDAKHIFPVTFPFNPSSLALETIQIPASLGLGFISRV

SEQ ID NO: 174 - DNA, 1559 bp, Homo sapiens
  source 1..1559: mol_type = other DNA
acagcagtccgtgccgccgtcccgcccgccagcgccccagcgaggaagcagcgcgcagcccgcggcccagcgcacccgcagcagcgcccgcagctcgtccgcgccatgttccaggcggccgagcgcccccaggagtgggccatggagggcccccgcgacgggctgaagaaggagcggctactggacgaccgccacgacagcggcctggactccatgaaagacgaggagtacgagcagatggtcaaggagctgcaggagatccgcctcgagccgcaggaggtgccgcgcggctcggagccctggaagcagcagctcaccgaggacggggactcgttcctgcacttggccatcatccatgaagaaaaggcactgaccatggaagtgatccgccaggtgaagggagacctggccttcctcaacttccagaacaacctgcagcagactccactccacttggctgtgatcaccaaccagccagaaattgctgaggcacttctgggagctggctgtgatcctgagctccgagactttcgaggaaatacccccctacaccttgcctgtgagcagggctgcctggccagcgtgggagtcctgactcagtcctgcaccaccccgcacctccactccatcctgaaggctaccaactacaatggccacacgtgtctacacttagcctctatccatggctacctgggcatcgtggagcttttggtgtccttgggtgctgatgtcaatgctcaggagccctgtaatggccggactgcccttcacctcgcagtggacctgcaaaatcctgacctggtgtcactcctgttgaagtgtggggctgatgtcaacagagttacctaccagggctattctccctaccagctcacctggggccgcccaagcacccggatacagcagcagctgggccagctgacactagaaaaccttcagatgctgccagagagtgaggatgaggagagctatgacacagagtcagagttcacggagttcacagaggacgagctgccctatgatgactgtgtgtttggaggccagcgtctgacgttatgagcgcaaaggggctgaaagaacatggacttgtatatttgtacaaaaaaaaagttttatttttctaaaaaaagaaaaaagaagaaaaaatttaaagggtgtacttatatccacactgcacactgcctggcccaaaacgtcttattgtggtaggatcagccctcattttgttgcttttgtgaactttttgtaggggacgagaaagatcattgaaattctgagaaaacttcttttaaacctcacctttgtggggtttttggagaaggttatcaaaaatttcatggaaggaccacattttatatttattgtgcttcgagtgactgaccccagtggtatcctgtgacatgtaacagccaggagtgttaagcgttcagtgatgtggggtgaaaagttactacctgtcaaggtttgtgttaccctcctgtaaatggtgtacataatgtattgttggtaattattttggtacttttatgatgtatatttattaaacagatttttacaaa

SEQ ID NO: 175 - protein, 317 aa, Homo sapiens
MFQAAERPQEWAMEGPRDGLKKERLLDDRHDSGLDSMKDEEYEQMVKELQEIRLEPQEVPRGSEPWKQQLTEDGDSFLHLAIIHEEKALTMEVIRQVKGDLAFLNFQNNLQQTPLHLAVITNQPEIAEALLGAGCDPELRDFRGNTPLHLACEQGCLASVGVLTQSCTTPHLHSILKATNYNGHTCLHLASIHGYLGIVELLVSLGADVNAQEPCNGRTALHLAVDLQNPDLVSLLLKCGADVNRVTYQGYSPYQLTWGRPSTRIQQQLGQLTLENLQMLPESEDEESYDTESEFTEFTEDELPYDDCVFGGQRLTL

SEQ ID NO: 176 - DNA, 6139 bp, Homo sapiens
  source 1..6139: mol_type = other DNA
gtcttcctcccccagggttgtggccacgcgcagcggcggcggttgttccgcttcccctccggcccgggccgtcgccattgccgaaggctccctcccctcccctccctggcgtgcgcaggactccgccgccgctgggcctagcggtagcagcggctgctccagcgcggcgtctcttcccgccccgcttccccttccctcccctcccctccccgcaccgcgcgctagcccggggcggctccgcagcccgccgggagctctgaccgaggcgcctcgctggggcggggaccttgccttgcccggggccatttcataattctgaatcatgtctgataacggagaactggaagataagcctccagcacctcctgtgcgaatgagcagcaccatctttagcactggaggcaaagaccctttgtcagccaatcacagtttgaaacctttgccctctgttccagaagagaaaaagcccaggcataaaatcatctccatattctcaggcacagagaaaggaagtaaaaagaaagaaaaggaacggccagaaatttctcctccatctgattttgagcacaccatccatgttggctttgatgctgttactggagaattcactggcatgccagaacagtgggctcgattactacagacctccaatatcaccaaactagagcaaaagaagaatcctcaggctgtgctggatgtcctaaagttctacgactccaacacagtgaagcagaaatatctgagctttactcctcctgagaaagatggctttccttctggaacaccagcactgaatgccaagggaacagaagcacccgcagtagtgacagaggaggaggatgatgatgaagagactgctcctcccgttattgccccgcgaccggatcatacgaaatcaatttacacacggtctgtaattgaccctgttcctgcaccagttggtgattcacatgttgatggtgctgccaagtctttagacaaacagaaaaagaagactaagatgacagatgaagagattatggagaaattaagaactatcgtgagcataggtgaccctaagaaaaaatatacaagatatgaaaaaattggacaaggggcttctggtacagttttcactgctactgacgttgcactgggacaggaggttgctatcaaacaaattaatttacagaaacagccaaagaaggaactgatcattaacgagattctggtgatgaaagaattgaaaaatcccaacatcgttaactttttggacagttacctggtaggagatgaattgtttgtggtcatggaataccttgctggggggtcactcactgatgtggtaacagaaacgtgcatggatgaagcacagattgctgctgtatgcagagagtgtttacaggcattggagtttttacatgctaatcaagtgatccacagagacatcaaaagtgacaatgtacttttgggaatggaaggatctgttaagctcactgactttggtttctgtgcccagatcacccctgagcagagcaaacgcagtaccatggtcggaacgccatactggatggcaccagaggtggttacacggaaagcttatggccctaaagtcgacatatggtctctgggtatcatggctattgagatggtagaaggagagcctccatacctcaatgaaaatcccttgagggccttgtacctaatagcaactaatggaaccccagaacttcagaatccagagaaactttccccaatatttcgggatttcttaaatcgatgtttggaaatggatgtggaaaaaaggggttcagccaaagaattattacagcatcctttcctgaaactggccaaaccgttatctagcttgacaccactgatcatggcagctaaagaagcaatgaagagtaaccgttaacatcactgctgtggcctcatactcttttttccattttctacaagaagccttttagtatatgaaaattattactctttttggggtttaaagaaatggtctgcataacctgaatgaaagaagcaaatgactattctctgaagacaaccaagagaaaattgcaaaaagacaagtatgacttttatatgaaccccttctttagggtccagaaggaattgtggactgaatcactagccttaggtctttcagcaaacagcctatcagggccatttatcatgtgtgagatttgcattttactttgctgactttgttgtaatagatcccattcattgtcccctttggggtatttccaatacttgaatggcagattggagtttttcagagtatgtgtttcatctgctagtctttctctccttcatagcttttcttttcctggacttgctccttttgagttgcttttgcgtttctcatgcctaggcaagtgtaatagaaattatgtagctccttatgttggcaaaggagctctatatagtttcactttgtataaaagttaggaccagctgttgttacatgtaatattttagttcagaacttgacctgaaggaagggaagaaaagtatgtgatttttaccttttttaacaaatgtgaaaaagtcagttttagaaatttcgtggtagtaagttcggcatttgttacatgtatagagagaagactaataatctctatttataactaaatcattgagatagaaaaagattcccattgactgtagacttcttcccattttgtcttcccttctgcctgtttccccttcaggcttggctctaggaaccaaagtgatttgttgttgttccaacctgggctttgtgactttggttagtgccactaccttcttccctcctttcccccttcaatttggaaataaatttctgtatatgttgcaattttaggtttaggtttgttctttttctttttcattaatcctctctcacctcacagataccccctcccatggcaaataatataataaccagtgaattttcaggaatttaaaaattagcttttttccacttaaaggagaaaaatatttgggactagcagcagaggcagtaagagatgtgaaccttggtgagctctgatacagtgagaagagattatactcatgaaagagaatgttagtgttacagagaagcagccgatagcaaatcgactgtagagacttggcggcggtggcattgccccaggtcgtcagcagtgtggtattatctatgagaacttgagcgacagagtatttcttgatgaatttatagatcatttgagatgttgagttactttagtttagttttgttttgttttttcaaataagtagagactattgtaaaaaacgagaaaggaaaatgaaatgtgcgtgttgatagcaataatttgtttcttttaaagattctaaaaggtctgagacctgtagcattaattatttgagtgccctcccttctcccctcccctcccttttctcttctcttttttcctctcctcttcttctcctttattcattgttttgcttttggagtgggtgttgttcaagtatctgtggtttggttctggcattttgttcccaccatccccttcccccattaacttcccccctgcttgccatcctgcagtagtataaatcatgaataaaaaataattttgctgttgtagtatacattggagaaactggcaggttttatttccattattttatttccactatatctatgataagatgcaattataaggagagaagtgactgttttttattgataaggcaagattttcagaaaaatgagtaaaataattaatgaaacatatttagagcacttaatggtctctgttttcaatataattcttgatttcatttttctctggaatatattggccttctacagctattactgaattatagaaactggtttatttctggcagaaagctgcagtgccacctgagttccaaattttaccattctttgtaaacagttggatggattatgataaagaagatgctaccaatgaaatagaaaaccaacgagatgagaagactgtgatcctcatgtactcagaggcacttccctcctaagtcaaagaccatcctcactgactatgtgccaacgcctcgtttcaggcttgtgactcaacaaagggcttttccattgatagaagcagtttgggatttgtagttgcgacttcttcgatagttacctgcacgtccattgctggcaactgacttgtcattaaaacctggctctttggttaagggagctacgctgtggtttattcttaagttacgtggataaactaacctctaacagaaatatactttggttaattttgaaatgtgtcatttttaaacaatcttaaaagtaatacagaattgtgatttattaattttaaaacattcagaacttgttgaaagaaaaattatatctgaatcaagattcatgttttttatttttattttttttgatacagagtctcactctgtcactcaggctggagtgcagtgacatgatctcagctcactgcaacctccgcttcctgggttcaagcaattctcatgcctcagcctcctgagtagctgagaccacaggcacccgccaccacacccagctatttttttgtatttttagtagagacagagtctcaccacattgcccaggctggtctccaactcctgagctcaggcagtctgcccaccttggcctcccaaagtgctgcagttacaggcgtgagccactgcacctggcctcatgttttttaaataattgccttttatatttaccctttttgtcatcactttagaatgaaaattcccatttaaatctgaaagttaccttaatagtcctcttgtgttattaggacagtattattatagtacttatttattttattttagatttaaagttatcttctctttttcttttttcttctgctgcttttagggacaattaaaactgggaaactatgaaacatggaacattttatcctacctgaaagtaaacgagtaattgtgaagcataagacactgaggctaatacaactctgtcttcatgtgttgactgcctggcacatagtattcattctcttccctttaacatagaagtgtccagctgcgtacagtctagtaaccagcaactgtaaacgaacctgtgcctctaacaagcgattctaaaccacctatgagtatttcttttagggctcacttaaatacatgtttgtatatactgtattctagccagaataattttagatctgatcaggtagtagctaaaattagaaaaaaacaaaatagatgcttaaagaatttgcatccatttttgagtctaaatcttttaaaatatactgagatccacatctagtgaaatgtcagtgtcaaaatattatagattatagctaaaatccagattaatactcatttggggttttttatagtggaacttcatagtaatacaaaaagcagattgtcttcctgtctccgctgctcccacagtaggtattgaaactggtaaaatcagttttttgatagtgtgtgtatataagaaaaaatagatacacacattcttttttctcagtcaacacattgattgaacactctggcaaagatgctgtggtggatgaggttggagttcgaaagaagaagcaagcgctggcctggccttgaaagaaccgaagtctttcccattcacttctctagaaagctgccaagacagaggcagaaagaaatggatgatagttctgtcaagcacacttctgttctcttagaacttagaagtgtttctaagagaacagaagtaataagagaaacagttacgtgtggaattcaacatctttggttggaacgcattggctttttttttcttgttttgatagaaatggaattaagcaaaagtagtttttgtcttttctgttgtcttcaaattttatgccttttatttttaatttaatcccgttcaattatttaattgttatacattgacattaactgctgtattttgactttgttcaataattttgttctttcagggctagaaataaactttttaaaaaaagtgtgcatttttccctttcctaaacttttattctttcttttgatcagcgtaaaagaatattttaatgtcttttgatagcataaaagaatatttaaatgtcttaataggttttcaaagaacatttagtatttttagtgataaatgttttaaaccttttaa

SEQ ID NO: 177 - protein, 524 aa, Homo sapiens
MSDNGELEDKPPAPPVRMSSTIFSTGGKDPLSANHSLKPLPSVPEEKKPRHKIISIFSGTEKGSKKKEKERPEISPPSDFEHTIHVGFDAVTGEFTGMPEQWARLLQTSNITKLEQKKNPQAVLDVLKFYDSNTVKQKYLSFTPPEKDGFPSGTPALNAKGTEAPAVVTEEEDDDEETAPPVIAPRPDHTKSIYTRSVIDPVPAPVGDSHVDGAAKSLDKQKKKTKMTDEEIMEKLRTIVSIGDPKKKYTRYEKIGQGASGTVFTATDVALGQEVAIKQINLQKQPKKELIINEILVMKELKNPNIVNFLDSYLVGDELFVVMEYLAGGSLTDVVTETCMDEAQIAAVCRECLQALEFLHANQVIHRDIKSDNVLLGMEGSVKLTDFGFCAQITPEQSKRSTMVGTPYWMAPEVVTRKAYGPKVDIWSLGIMAIEMVEGEPPYLNENPLRALYLIATNGTPELQNPEKLSPIFRDFLNRCLEMDVEKRGSAKELLQHPFLKLAKPLSSLTPLIMAAKEAMKSNR

SEQ ID NO: 178 - DNA, 3017 bp, Homo sapiens
  source 1..3017: mol_type = other DNA
ggcttttctctttagcgctcagggcgctgacccactgctcttcctcttaagaaagtgctccattccttccggcgcccggagctgctggcccaaagggatccggagcgagctagggcagacaccatgaccacccttgatgataagttgctgggggagaaactgcagtactactatagcagcagtgaggatgaggacagtgaccacgaggacaaggaccgaggcagatgtgccccagccagcagttctgtgcctgcagaggctgagctggcaggcgaaggcatctcagttaacacaggcccaaaaggtgtgatcaatgactggcgccgcttcaagcagttggagacagagcagagggaggagcagtgccgggagatggaaaggctgatcaagaagctgtcaatgacttgcaggtcccatctggatgaagaggaggagcaacagaaacagaaagacctccaggagaagatcagtgggaagatgactctgaaggagtttgccataatgaatgaggaccaagatgatgaagagtttctgcagcagtaccggaagcagcgaatggaagagatgcggcagcagcttcacaaggggccccaattcaagcaggtttttgagatctccagtggagaagggtttttagacatgattgataaagaacagaaaagcattgtcatcatggttcatatttatgaggatggcattccagggaccgaagccatgaatggttgcatgatctgccttgccgcagagtacccagctgtcaagttctgcaaggtgaagagctcagttattggcgccagcagtcagttcaccaggaatgcccttcctgccctgctgatctataaggggggtgaattgatcggcaattttgttcgtgttactgaccagctgggggatgatttctttgctgtggaccttgaagcttttctccaggaatttggattactcccagaaaaggaagtcttggtgctgacatctgtgcgtaactctgccacgtgtcacagtgaggatagcgacctggaaatagattgaactgatagtctagttgcatagatttctcattgtttgggttggaatacacgtcattgtttatttttgttcctttgtcttctggcttttcagctgttctttgtagtcccttttattatgcataaaataaagaaattcttagattaaatcagaatgctgaataaccttgtagctagcaataaggtgacttacagttgtataaacaggaagccaggcttttgaactgtttacttaagattctgtggtgtgacatctctgttattgtttccagtcaatatttacaaagcatcctaaagacagggtcttggaaattgtcttcagatgatcttagaggtctctgccaagtctgagagtataattctgtaggtattgtgttatttgcaacgtaaatagtgcattttcttaatcaaatgattgtaaattatatttacttgtaatcagttccatagctttagacggtggttagattttttttttccccaccagggtcttgtttaaaggggtgagccaccgcacccagtcctgaggggtggcctctgctgctggatttcatgtcttcctccagcatgactaagtctggaacagcaggaagggttgatgcttactgacctggtgatgttagaagacaagtagtttatggatttaaacattagagctggagtggggctggaaatctttgtaaaggaagttctttcagtaagatgcccctgcttgtctttgtctcttttttgtttaacaaggtaactttttgtttaacaaggtaactttttgtttaacctagattttttttaaaactttttttttttttcatattggaaaagtaattcatattcagtagaggaaaactgaccaaaacagaagcaaaaataagaaaattaaaataatctctaatcctactacctagaataaaacactattaatattttggtctgtttcctgccaaggtgttttctgtgtatacatggatattttgtttgtttttaaacaaaacgatgggatcattctgaacatactgttctatagtatggtcagctaataatatatcagacctttttttatattattaaatattctacaactttttaaaaatgtctattaatattccatcgtatagatgtgatataatttgcttgatggttgtctcttaaaaagaaagatagcaaatactttttttaaattacaaaagtgatagatgttcattgtagaaaatgtaataaacactgttaagacttaaaagccatataattccaccaaccaaaattaatcccttttgtcatatttctagtcatttttatagcctttttttctatgtatttataataattatcatttgcgtttttttcctttttttaactttaaaaatgtatattctagggtcaggggaaatgtaatctggaattaaatattagccttaaaattcacaattttgattttcctggcttttcaggaattgactaactgtaaaagagtcttgaaagtatttagtcaacaaacagagtgcattttttttttttttgactaagaaagctcgttgtagtagaaagggtggaatgtattgaaaattattagaagcagggaagtattgttagtctagcttatttcctttcagtcttttttcaatatttttataaacattgagtacttactgaatttagttctgtgctcttccttatttagtgttgtatcataaatactttgatgtttcaaacattctaaataaataattttcagtggcttcataatatttcatcatttggatatataataatttatttaaccagtctctttatttttatttatttattttgtttgttttctttgagatggagtctcgctctgtcacccaggctggagtacaatagcgtgatctcggctcactgcaacctccacctcctgggttcaagcagttctcctgcctcagcctcctgagtagctgggactacaggcacatgccatcacgcctggctaatttttgtatttttactagagac

SEQ ID NO: 179 - protein, 301 aa, Homo sapiens
MTTLDDKLLGEKLQYYYSSSEDEDSDHEDKDRGRCAPASSSVPAEAELAGEGISVNTGPKGVINDWRRFKQLETEQREEQCREMERLIKKLSMTCRSHLDEEEEQQKQKDLQEKISGKMTLKEFAIMNEDQDDEEFLQQYRKQRMEEMRQQLHKGPQFKQVFEISSGEGFLDMIDKEQKSIVIMVHIYEDGIPGTEAMNGCMICLAAEYPAVKFCKVKSSVIGASSQFTRNALPALLIYKGGELIGNFVRVTDQLGDDFFAVDLEAFLQEFGLLPEKEVLVLTSVRNSATCHSEDSDLEID

SEQ ID NO: 180 - DNA, 4491 bp, Homo sapiens
  source 1..4491: mol_type = other DNA
agatgctgcggctcgccgcgcggctccagctggggcgcggtggtcccgacggtcacccgaatcgcagggagtcgccgctggagaggggctcggcgcccggcggggactgcaggcgatgacccaggatgcagccaggggccacgacatgcacggaggaccgcatccagcatgccctggaacgctgcctgcatggactcagcctcagccgccgctccacctcctggtcagctgggctgtgtctgaactgctggagcctgcaggagctggtcagcagggacccgggccacttccttatcctccttgagcagatcctgcagaagacccgagaggtccaggagaagggcacctacgacctgctcaccccgctggccctgctcttctattccactgttctttgtacaccacacttcccaccagactcggatctccttctgaaggcagccagcacctaccaccggttcctgacctggcctgttccttactgcagcatctgccaggagctgctcaccttcattgatgctgaactcaaggccccagggatctcctaccagagactggtgagggctgagcagggcctgcccatcaggagtcaccgcagctccaccgtcaccgtgctgctgctgaacccagtggaagtgcaggccgagttccttgctgtagccaataagctgagtacgcccggacactcgcctcacagtgcctacaccaccctgctcctgcacgccttccaggccacctttggggcccactgtgacgtcccgggcctgcactgcaggctacaggccaagaccctggcagagcttgaggacatcttcacggagaccgcagaggcacaggagctggcatctggcatcggggatgctgcagaggcccggcggtggctcaggaccaagctgcaggcggtgggagaaaaagctggcttccctggggtgttagacactgcaaaaccagggaagctccacaccatccccatccctgtcgccaggtgctacacctacagctggagccaggacagctttgacatcctgcaggaaatcctgctcaaggaacaggagctactccagccagggatcctgggagatgatgaagaggaggaagaggaggaggaggaggtggaggaggacttggaaactgacgggcactgtgccgagagagattccctgctctccaccagctctttggcgtcccatgactccaccttgtcccttgcatcctcccaggcctcggggccggccctctcgcgccatctgctgacttcctttgtctcaggcctctctgatggcatggacagcggctacgtggaggacagcgaggagagctcctccgagtggccttggaggcgtggcagccaggaacgccgaggccaccgcaggcctgggcagaagttcatcaggatctataaactcttcaagagcaccagccagctggtactgcggagggactctcggagcctggagggcagctcggacacggccctgcccctgaggcgggcagggagcctctgcagccccctggacgaaccagtatcacccccttcccgggcccagcgctcccgctccctgccccagcccaaactcggtacccagctgcccagctggcttctggcccctgcttcacgcccccagcgccgccgccccttcctgagtggagatgaggatcccaaggcttccacgctacgtgttgtggtctttggctccgatcggatttcagggaaggtggctcgggcgtacagcaaccttcggcggctggagaacaatcgcccactcctcacacggttcttcaaacttcagttcttctacgtgcctgtgaagcgaagtcatgggaccagccctggtgcctgtccaccccctcggagccagacgccctcacccccgacagactcccctaggcacgccagccctggagagctgggcaccaccccatgggaggagagcaccaatgacatctcccactacctcggcatgctggacccctggtatgagcgcaatgtactgggcctcatgcacctgccccctgaagtcctgtgccagcagtccctgaaggctgaagcccaggccctggagggctccccaacccagctgcccatcctggctgacatgctactctactactgccgctttgccgccagaccggtgctgctgcaagtctatcagaccgagctgaccttcatcactggggagaagacgacagagatcttcatccactccttggagctgggtcactccgctgccacacgtgccatcaaggcgtcaggtcctggcagcaagcggctgggcatcgatggcgaccgggaggctgttcctctaacactacagattatttacagcaagggggccatcagtggacgaagtcgctggagcaacctggagaaggtctgtacctccgtgaacctcaacaaggcctgccggaagcaggaggagctggattccagcatggaggccctgacgctaaacctgacagaagtggtgaaaaggcagaactccaaatccaagaagggctttaaccagattagcacatcgcagatcaaagtggacaaggtgcagatcatcggctccaacagctgcccctttgctgtgtgcctggaccaggatgagagaaagatcctgcagagtgtagtcagatgtgaggtctcaccgtgctacaagccagagaagagcgacctctcctcaccaccccagacgcctcctgacctgccggcccaggccgcacctgatctctgctcccttctctgcctgcccatcatgactttcagtggagctctgccctagtgtgggcccagcgccagactggacagaagccctggggcaacctcctcggccacccctccaggacagtccctctctgtggagaactgaatggccctgtgcagagccatagtcccactgtgggtcctgcaatgagcaggggctgggagtagagggtttctggggcctcagggttctgggaaagcaacagctatcagagagagaagggccagaccccatagcctcttagattcctggcagtagaaggagaaggatgggtaaattgacctctgaagtccctgaccattagcatggtctaggatcctttctagaaggaagatctgaggctctggtgctcagggggatggcttgggccttttctctcaaccttggctgagcctaccccttactttgccaaagacttgaggaccctgtatgtctggagttcagtcccctcctctgtggggctcaggtgattgaaatgtggatgaaacatttctctacttcaagaccacctctccctgcaaacaccacacacacatggcatgcatgtacgcacatgcgcacacacacacgcacacacctcaataatttctctcaagtttcctgagtctccagaaaaacagcactaacgctggacctgtctactctcagaacccggcacagattctctcttgatctccttttggaatctgagattcttagaagacaggatagggttaaatttagtagcagctcagttctagctaaatcactagaggaagttaattaactttaagccttcatttctccagcactaaaatggagtggagagttggggtggaaataagacatccttaaaaggttaaattgtctgcaaagcacctagcccagtgccgagctcccagtaggtgttcagtaaagcttagtgcctgactttctgaacactgattcctcctgtttggagtcactgggatactctcattgccgttgggatgttcctcactccttcccagttcgtggctgaggcagaacccagactgaagagggaagagacattccagaggaggattgccttcgtcagggtaaggggtgggctgctcaggggccctacccttcacccccttctgtatcagattggccctcccactcccatctcactctgcgtgtacaatcttccatatccgcaagttcactggcactcttctggcacctgggcaagatcccagaacagaggatggagtgactggcctcacagagcttagtgcccgactcaggggaaatgggactggtgcatgggaaatggtcagcctaggataggacacgagagtctgaaattcaaagcaaccagcttgaagtggtttgagaagctggaagcaaacatgggctagagagatagggcagaagtcaagacgaggatctggactgatgtggagaaagtagccacggaagcatgaactgtatcctgcacaaagtccctcttccccgcctcctaattcattatgcccaaaaggccttacgtgaaattccagcccagagtactcatgacttgagagacgtggacagagccagcttctaccttgcctggccgtctctcccctgtcttaatgtctgctcttgctctaagctccagaagagtggcgggccatgtatcttcaatatgtttttgctgtatgggcaggttgtcttattatgtgatcaacagatgtccaggaactaatgagtggaatttaatattattgtcaaataaaacttgatttgtcctata

SEQ ID NO: 181 - protein, 880 aa, Homo sapiens
MQPGATTCTEDRIQHALERCLHGLSLSRRSTSWSAGLCLNCWSLQELVSRDPGHFLILLEQILQKTREVQEKGTYDLLTPLALLFYSTVLCTPHFPPDSDLLLKAASTYHRFLTWPVPYCSICQELLTFIDAELKAPGISYQRLVRAEQGLPIRSHRSSTVTVLLLNPVEVQAEFLAVANKLSTPGHSPHSAYTTLLLHAFQATFGAHCDVPGLHCRLQAKTLAELEDIFTETAEAQELASGIGDAAEARRWLRTKLQAVGEKAGFPGVLDTAKPGKLHTIPIPVARCYTYSWSQDSFDILQEILLKEQELLQPGILGDDEEEEEEEEEVEEDLETDGHCAERDSLLSTSSLASHDSTLSLASSQASGPALSRHLLTSFVSGLSDGMDSGYVEDSEESSSEWPWRRGSQERRGHRRPGQKFIRIYKLFKSTSQLVLRRDSRSLEGSSDTALPLRRAGSLCSPLDEPVSPPSRAQRSRSLPQPKLGTQLPSWLLAPASRPQRRRPFLSGDEDPKASTLRVVVFGSDRISGKVARAYSNLRRLENNRPLLTRFFKLQFFYVPVKRSHGTSPGACPPPRSQTPSPPTDSPRHASPGELGTTPWEESTNDISHYLGMLDPWYERNVLGLMHLPPEVLCQQSLKAEAQALEGSPTQLPILADMLLYYCRFAARPVLLQVYQTELTFITGEKTTEIFIHSLELGHSAATRAIKASGPGSKRLGIDGDREAVPLTLQIIYSKGAISGRSRWSNLEKVCTSVNLNKACRKQEELDSSMEALTLNLTEVVKRQNSKSKKGFNQISTSQIKVDKVQIIGSNSCPFAVCLDQDERKILQSVVRCEVSPCYKPEKSDLSSPPQTPPDLPAQAAPDLCSLLCLPIMTFSGALP

SEQ ID NO: 182 - DNA, 8515 bp, Homo sapiens; identical to SEQ ID NO: 54
  source 1..8515: mol_type = other DNA

SEQ ID NO: 183 - protein, 403 aa, Homo sapiens [sequence omitted]

SEQ ID NO: 184 - DNA, 5638 bp, Homo sapiens
  source 1..5638: mol_type = other DNA
gctccgcctcgcccggctacgcaggcggcagggctgcggcacgggccgggcggcaccatggcggcggcggcgcctgctgctgcggcggcttcttccgaggcgccagcggcgagtgcgactgcagagcccgaggccggggaccaggacagtcgcgaggttcgagtgttgcagagcctgcggggcaagatctgtgaagcaaaaaatttattgccatatcttggaccccacaaaatgagagattgtttctgtaccataaatttggaccaggaagaagtttatcgtacccaagttgtggaaaaatctttaagcccatttttcagtgaagaattttactttgagattccaagaactttccagtatttgtctttctatgtttatgataagaatgttttacaaagagatctccgtataggaaaagtagccatcaaaaaagaagacttgtgtaatcacagtggcaaagaaacttggttttcattacagcctgttgactccaattcagaggttcagggtaaagttcaccttgaattaaaactgaatgaactgataacggagaatggaactgtatgccagcagcttgttgtacacatcaaggcatgccatgggttgcctctcataaatggccaaagctgtgacccttatgcaacagtttctctagtgggcccttctaggaatgaccaaaagaagacaaaagtaaagaagaaaacaagcaatccgcagtttaatgaaatcttttattttgaggtaaccagatccagtagttacaccagaaagtcccagttccaggtagaagaggaggacattgaaaagctagaaatcaggatcgacttgtggaacaatggaaacctagtccaagatgttttcctaggtgagattaaggttcctgtgaacgtattaagaactgattcctctcatcaagcctggtacttgctacagccaagagacaatggaaacaagtcatccaaaactgatgacctggggtctcttcgattaaatatatgttatacagaagactacgtgcttccttcagagtactatggtcctttgaaaactttgctgctaaaatcaccagatgttcaaccaatatctgcctcagctgcttacattttgagtgaaatatgtcgagataaaaatgatgctgttttgccccttgtacgactgctgctgcaccatgataaacttgttccttttgccactgctgtggctgaattagacttgaaggatacacaagatgcaaacacaatttttagaggaaattccctggctacccgatgtctggatgagatgatgaaaatagtgggagggcactacctgaaagtaacattaaaacctattcttgatgagatatgtgactcctcaaaatcctgtgaaatcgatcctattaaattgaaagagggagataatgtagaaaataataaggagaatctgcgctactatgtagacaagttattcaatacaattgtaaaatcaagtatgagctgccccactgtaatgtgtgatatcttttattctctaaggcagatggctactcagagatttcctaatgaccctcatgttcagtattctgcagtgagcagctttgtatttcttcgtttctttgctgtagccgtagtatcacctcatacttttcatttgcgacctcatcatccagatgcacagacaattagaacattaactctcatctcaaaaactatacaaactttgggaagctgggggagtctgtccaaaagcaagtcaagtttcaaagagacattcatgtgtgaatttttcaaaatgtttcaagaagaaggatatattatagcagttaaaaagttcttggatgaaatttcatctactgaaactaaagagtccagtggtacgagtgagcctgtgcacctgaaagaaggtgagatgtataaaagagctcaaggaagaactcggattggaaaaaagaattttaagaaacgatggttctgcttaacaagcagagagctcacctaccacaaacagccaggcaaagatgcaatctacacaatcccagtaaaaaacattcttgctgtggaaaaactggaagagagctctttcaacaagaaaaatatgttccaagtaatacatacggagaaaccactctatgtccaggcaaataactgtgtagaagctaatgaatggatagacgtactctgcagggtgagccgatgcaatcaaaacaggctcagtttttatcatccctctgtgtatctgaacggaaattggctctgctgtcaggagactggtgaaaacactctcggctgcaagccatgtactgcaggtgtccctgcagacatccaaatagatattgatgaagacagagaaacagaaagaatttattccctttttaccctcagtttacttaagctgcagaagatggaagaggcttgtggaactattgcagtctatcaaggaccacagaaagagcctgatgattattctaactttgtaatcgaggattctgtaacaacctttaagacaattcagcaaataaaaagcataattgagaagctggatgaacctcatgaaaaatataggaagaaaagatccagtagtgcaaaatatgggagcaaggaaaatccaattgttgggaaagcatcttagagtttaacagattggttcagaagaactggaaaatattatttttcttggagcttttcaattcatcatgtattttgttcatggtatttaagaatgagcatccgcttcaatgtcatctgcctccacattgtatttaatatttaataattgaaattaattgtttgggaatcctggtattgatgtattactagagaatttaaagcccaagattcccttcatacctgtgtgaccaaatccatgtttctgcaacttctttttaatcgaaagaatcttcctagaaaagctttgtaacaaagggagaactcctccgtagcaagaaaccatctcttcttgtaacactctgttctgtggacttgttttcactaccatcagtgcctgctctatactgccaacattgtgttttactagaaaattccaattcatgacagttcagagcttttcatttagttcatgtagaccctcccactttaaaaaagaaaaaaaataagaagtgtttttcctttggtccatcagtcattacaggttccattcaagacagtgatagaaactttagaaaactgccagagcatacttgaaagttggtagatccttttgcctaaagatgtaaacaaaactcaagacagaaggaatcagggaatatgtgctattgtgtgcatcttgtttacatttgggatcagtgatggcaaaagaagtaatgagaccactgaaattgttttcattgttttaaataccaggtactcattttcttgatttgaaagtttaacatgacttctaaggacatctcttcaaaaagaaagtaaacagggaatgaaggtggtgggaaaatcacttcacttcacccactatttcatgttgtaataagggccaccataaggatgccctcctcatagtgttcggttctgatcttcctcgagaacagtcacttggcgcactttaataatctggactgctccagatttgactttagatactccatggtatctagtctttatgatcagttgaatgatcagtgtttaagtctaaaaataatgctttcctgaaaatgtttatatttcattgctgtttccttattgcctgctagccaaatggaatttgggcaagcaactctttgaagacttttttaccctagaaatttacttttgtcctaaaaaccctaactgtaaataagcagtcgaagcaagttgccaccttgaagttgagggatacactttgcttcatcagtattaaaaaccatggtactcttattttgtcttttttaattcaaaacattttctaaatgtggtactttgaaccttggagtatttacatgtttctgttcaaaactgtgacttattaatgtaagtctgctagtagtactttttttgtctgagcataagctatatttcaagatatactttgccaattttgttattggtgggtaatcatttttaaattatattgttattaggtaattatttttaaagactactggcatacaatcaaagttgttccataaaagaatataactgagcaatgtatttctctaaatgacttgtaaaaatcaatgaattatgtttaagtctgcattatggtaggttattactcccagctcattttaaagacaagtttgaaagagtcctttaaattttataagcttgtagattccataaactacactgatttatacatttgaaagaatttagccatttaataaatttcttattctcaaattgcatttagattaaaattccttttaagagtgtctgaaatgtctgcctgcgaagaacatgtaaacattgccagataccagtcattattctttagtggctttttagtcctctgcttttttttttaaggcaaaagaaatatgcatctagcatttctaataccaaatccccaattgtgattgttttaaagatcatggtatgatcacagggaccaaggctgtgtgcatatataactctggatttgaaaggaggagagttcagccatctagttcttttcttcacatgacacttttaaacagccagtttgactggaattaaccaacttggcacagcctaaaaaaggagtaatgtgaaattaaattatttttctttgaaagtcttttgaaataagagaccatgtaagtaggaccctaagacaaccaaggaatttgcttccagggccctcattcctctgctgttacttacaaatgttttaatttttactacctgatattctttctctaccttttccacatttgaaaatatacaaggcagctcacttcatcctaaaaacctaaaaactccaggaaggaaagaaaaggatgatatggggaaatttgccataaatgccggttctggttcttagtttagccatttccatcagttgaaattgtggtgtgatctgttgcttgtttcgttgttgttttgtttttgtgtagctttgttttttaatattcatttaataagatgatgggcaatagcaaacatttttactcccaggaatataatttatcaaattgaactattttatttgccaaagaaacttgtttttaatatcacgggtaatgggtaagtgtgaaaactaggcttttttttatgaaacaaaaaaaggtgacgaataatatggcttttgtttctgtttctgaagcctgatttcatttatgccaggttttgaaaaacagatctttttcttaagtgaaagcacctttaatttgctctaacggtacatcctgtaaagacagaattctgcatagccttttaggtgtttttacagtatgtgaaaaatacaagactcattctagagttaaattaccaatcttggttgatattatctgcttccatttttattaatttggaaattaatatgttgctagtaaatattggtttttacagtacccagtttgaaaatgtaagttatcaaaacttaatgtagtgaatttgtgtaaccatgttgtattgttgagaatgtatttttatttaaattttattttcttatcaagagtattataaaaattaacttttgtaactgtcgcttggaaataactcaaataaattacaagaagcctgtc

SEQ ID NO: 185 - protein, 849 aa, Homo sapiens
MAAAAPAAAAASSEAPAASATAEPEAGDQDSREVRVLQSLRGKICEAKNLLPYLGPHKMRDCFCTINLDQEEVYRTQVVEKSLSPFFSEEFYFEIPRTFQYLSFYVYDKNVLQRDLRIGKVAIKKEDLCNHSGKETWFSLQPVDSNSEVQGKVHLELKLNELITENGTVCQQLVVHIKACHGLPLINGQSCDPYATVSLVGPSRNDQKKTKVKKKTSNPQFNEIFYFEVTRSSSYTRKSQFQVEEEDIEKLEIRIDLWNNGNLVQDVFLGEIKVPVNVLRTDSSHQAWYLLQPRDNGNKSSKTDDLGSLRLNICYTEDYVLPSEYYGPLKTLLLKSPDVQPISASAAYILSEICRDKNDAVLPLVRLLLHHDKLVPFATAVAELDLKDTQDANTIFRGNSLATRCLDEMMKIVGGHYLKVTLKPILDEICDSSKSCEIDPIKLKEGDNVENNKENLRYYVDKLFNTIVKSSMSCPTVMCDIFYSLRQMATQRFPNDPHVQYSAVSSFVFLRFFAVAVVSPHTFHLRPHHPDAQTIRTLTLISKTIQTLGSWGSLSKSKSSFKETFMCEFFKMFQEEGYIIAVKKFLDEISSTETKESSGTSEPVHLKEGEMYKRAQGRTRIGKKNFKKRWFCLTSRELTYHKQPGKDAIYTIPVKNILAVEKLEESSFNKKNMFQVIHTEKPLYVQANNCVEANEWIDVLCRVSRCNQNRLSFYHPSVYLNGNWLCCQETGENTLGCKPCTAGVPADIQIDIDEDRETERIYSLFTLSLLKLQKMEEACGTIAVYQGPQKEPDDYSNFVIEDSVTTFKTIQQIKSIIEKLDEPHEKYRKKRSSSAKYGSKENPIVGKAS

SEQ ID NO: 186 - DNA, 1049 bp, Homo sapiens
  source 1..1049: mol_type = other DNA
gctctacctcttggacttccaacttctgtgagtcaacatagtgcctcttgcatttaagtgtctgcaggaaaaatgatgagaactctcatcaccacacacccactgcccctgcttctattgccgcagcagctgctgcagctggtgcagtttcaagaggtggatacagattttgatttcccagaagaagataaaaaagaagaatttgaagagtgtttggaaaaattttttagtacagggcccgccagaccacctaccaaagaaaaagtcaaaagacgtgtccttattgaacctggaatgccactaaatcatatagagtactgtaaccatgaaatcatgggaaaaaatgtttactacaaacaccgttgggtggcagaacattacttccttcttatgcaatatgacgagctccaaaaaatctgttacaacagatttgtgccatgtaagaatggaattaggaaatgtaacaggagcaaaggtcttgtagaaggagtgtattgtaatttaacagaagcatttgaaataccagcgtgtaaatacgaatcactttataggaagggctacgtccttatcacttgttcatggcaaaatgaaatgcaaaaacgtattcctcatactataaatgatctcgtggagccacctgaacacagaagtttcctcagtgaggatggtgtctttgtcatatcgccctagcagagcgttctctgagagcttagggtgggaggaatatttctctccatactgatccttatagatcaaagttgagaatggtaattttgcttccattcactttaatcacccaccttcctttcttcctttcccaacacctcacaaaagcaccttaggctaggttcacagacggtgctctgagatgtggtctcatgcaggtcccctaagttagcatgccttgaatgtgttacggatacagatgcctgcagtggaaggatgaccagcaccaagaggaaaaggaaatggttgcctgaagtgtgctccaaagacacatccatgtgattctctagttcagcagaaagaataaaaattgcttcaatcta

SEQ ID NO: 187 - protein, 205 aa, Homo sapiens
MMRTLITTHPLPLLLLPQQLLQLVQFQEVDTDFDFPEEDKKEEFEECLEKFFSTGPARPPTKEKVKRRVLIEPGMPLNHIEYCNHEIMGKNVYYKHRWVAEHYFLLMQYDELQKICYNRFVPCKNGIRKCNRSKGLVEGVYCNLTEAFEIPACKYESLYRKGYVLITCSWQNEMQKRIPHTINDLVEPPEHRSFLSEDGVFVISP

SEQ ID NO: 188 - DNA, 782 bp, Homo sapiens
  source 1..782: mol_type = other DNA
agagccgccctagccttccgccttccccaagccaacgtctccgccgtcggctccgcggcgccgccatggccgacgtggaagacggagaggaaacctgcgccctggcctctcactccgggagctcaggctccaagtcgggaggcgacaagatgttctccctcaagaagtggaacgcggtggccatgtggagctgggacgtggagtgcgatacgtgcgccatctgcagggtccaggtgatggtggtctggggagaatgtaatcattccttccacaactgctgcatgtccctgtgggtgaaacagaacaatcgctgccctctctgccagcaggactgggtggtccaaagaatcggcaaatgagagtggttagaaggcttcttagcgcagttgttcagagccctggtggatcttgtaatccagtgccctacaaaggctagaacactacaggggatgaattcttcaaataggagccgatggatctgtggtcctttgggactcatcaaagccttggtttagcattttgtcagttttatcttcagaaattctctgcgattaagaagataatttattaaaggtggtccttcctacctctgtggtgtgtgtcgcgcacacagcttagaagtgctataaaaaaggaaagagctccaaattgaatcacctttataatttacccatttctatacaacaggcagtggaagcagtttcagagaactttttgcatgcttatggttgatcagttaaaaaagaatgttacagtaacaaataaagtgcagtttaaaaccc

SEQ ID NO: 189 - protein, 97 aa, Homo sapiens
MADVEDGEETCALASHSGSSGSKSGGDKMFSLKKWNAVAMWSWDVECDTCAICRVQVMVVWGECNHSFHNCCMSLWVKQNNRCPLCQQDWVVQRIGK

SEQ ID NO: 190 - DNA, 2359 bp, Homo sapiens
  source 1..2359: mol_type = other DNA
ccccggactctgcctgctcctgccatggtgccgtggccctgctgggcggatggagcaggatcccaagccgccccgtctgcggctctgggccctgatcccctggcttcccaggaagcagcggcccaggatcagccagacctctctgcctgtccctggccctggctctggcccccagcgggactcggatgagggcgtcctcaaggagatctccatcacgcaccacgtcaaggctggctctgagaaggctgatccatcccatttcgagctcctcaaggttctgggccagggatcctttggcaaagtcttcctggtgcggaaagtcacccggcctgacagtgggcacctgtatgctatgaaggtgctgaagaaggcaacgctgaaagtacgtgaccgcgtccggaccaagatggagagagacatcctggctgatgtaaatcacccattcgtggtgaagctgcactatgccttccagaccgagggcaagctctatctcattctggacttcctgcgtggtggggacctcttcacccggctctcaaaagaggtgatgttcacggaggaggatgtgaagttttacctggctgagctggctctgggcctggatcacctgcacagcctgggtatcatttacagagacctcaagcctgagaacatccttctggatgaggagggccacatcaaactcactgactttggcctgagcaaagaggccattgaccacgagaagaaggcctattctttctgcgggacagtggagtacatggcccctgaggtcgtcaaccgccagggccactcccatagtgcggactggtggtcctatggggtgttgatgtttgagatgctgacgggctccctgcccttccaggggaaggaccggaaggagaccatgacactgattctgaaggcgaagctaggcatgccccagtttctgagcactgaagcccagagcctcttgcgggccctgttcaagcggaatcctgccaaccggctcggctccggccctgatggggcagaggaaatcaagcggcatgtcttctactccaccattgactggaataagctataccgtcgtgagatcaagccacccttcaagccagcagtggctcagcctgatgacaccttctactttgacaccgagttcacgtcccgcacacccaaggattccccaggcatcccccccagcgctggggcccatcagctgttccggggcttcagcttcgtggccaccggcctgatggaagacgacggcaagcctcgtgccccgcaggcacccctgcactcggtggtacagcaactccatgggaagaacctggtttttagtgacggctacgtggtaaaggagacaattggtgtgggctcctactctgagtgcaagcgctgtgtccacaaggccaccaacatggagtatgctgtcaaggtcattgataagagcaagcgggatccttcagaagagattgagattcttctgcggtatggccagcaccccaacatcatcactctgaaagatgtgtatgatgatggcaaacacgtgtacctggtgacagagctgatgcggggtggggagctgctggacaagatcctgcggcagaagttcttctcagagcgggaggccagctttgtcctgcacaccattggcaaaactgtggagtatctgcactcacagggggttgtgcacagggacctgaagcccagcaacatcctgtatgtggacgagtccgggaatcccgagtgcctgcgcatctgtgactttggttttgccaaacagctgcgggctgagaatgggctcctcatgacaccttgctacacagccaactttgtggcgcctgaggtgctgaagcgccagggctacgatgaaggctgcgacatctggagcctgggcattctgctgtacaccatgctggcaggatatactccatttgccaacggtcccagtgacacaccagaggaaatcctaacccggatcggcagtgggaagtttaccctcagtgggggaaattggaacacagtttcagagacagccaaggacctggtgtccaagatgctacacgtggatccccaccagcgcctcacagctaagcaggttctgcagcatccatgggtcacccagaaagacaagcttccccaaagccagctgtcccaccaggacctacagcttgtgaagggagccatggctgccacgtactccgcactcaacagctccaagcccaccccccagctgaagcccatcgagtcatccatcctggcccagcggcgagtgaggaagttgccatccaccaccctgtgaggcaccagggcattcgggccacagggcggtgctagcttgacacagtcagcatgcttcccagagggagcaggccgg

SEQ ID NO: 191 - protein, 744 aa, Homo sapiens
MEQDPKPPRLRLWALIPWLPRKQRPRISQTSLPVPGPGSGPQRDSDEGVLKEISITHHVKAGSEKADPSHFELLKVLGQGSFGKVFLVRKVTRPDSGHLYAMKVLKKATLKVRDRVRTKMERDILADVNHPFVVKLHYAFQTEGKLYLILDFLRGGDLFTRLSKEVMFTEEDVKFYLAELALGLDHLHSLGIIYRDLKPENILLDEEGHIKLTDFGLSKEAIDHEKKAYSFCGTVEYMAPEVVNRQGHSHSADWWSYGVLMFEMLTGSLPFQGKDRKETMTLILKAKLGMPQFLSTEAQSLLRALFKRNPANRLGSGPDGAEEIKRHVFYSTIDWNKLYRREIKPPFKPAVAQPDDTFYFDTEFTSRTPKDSPGIPPSAGAHQLFRGFSFVATGLMEDDGKPRAPQAPLHSVVQQLHGKNLVFSDGYVVKETIGVGSYSECKRCVHKATNMEYAVKVIDKSKRDPSEEIEILLRYGQHPNIITLKDVYDDGKHVYLVTELMRGGELLDKILRQKFFSEREASFVLHTIGKTVEYLHSQGVVHRDLKPSNILYVDESGNPECLRICDFGFAKQLRAENGLLMTPCYTANFVAPEVLKRQGYDEGCDIWSLGILLYTMLAGYTPFANGPSDTPEEILTRIGSGKFTLSGGNWNTVSETAKDLVSKMLHVDPHQRLTAKQVLQHPWVTQKDKLPQSQLSHQDLQLVKGAMAATYSALNSSKPTPQLKPIESSILAQRRVRKLPSTTL

SEQ ID NO: 192 - DNA, 4537 bp, Homo sapiens
  source 1..4537: mol_type = other DNA
aatgctggggctgctgccgcggtcatgagggagccgctcccgggcagcgcttcctgggggacccctggccccccgagcgccgggaccatgtcccagctgcagctgtggctgcagtttgaggctctgaacaaggactcctcctattttgaggacttctccaacatctccatcttctcctcgtccgtggactccctgtcggacatcgtggacacgcccgacttcctgccggctgacagcctcaaccaggtgtccaccatctgggacgataaccctgccccctccacccacgataagctgttccagctcagcaggccgtttgcaggcttcgaggactttctgccctcccacagcaccccgcttctcgtcagctaccaggagcagagtgtgcagagccagccagaggaggaggacgaggctgaggaggaggaggcggaggagctggggcacacagagacctacgccgactacgtgccgtccaagtccaagatcgggaagcagcacccagaccgcgtggtggagaccagcacactgtccagcgtcccacccccagacatcacctacaccctggccctgccctcggacagcggggccctgtctgccctgcagctagaggccatcacctacgcctgccagcaacacgaggtcctgctccccagcgggcagcgcgcgggctttctcatcggcgatggggccggcgtgggcaaaggccggacggtggccggagtcatcctggagaaccacctgcgcggccggaagaaagcattgtggttcagcgtctccaacgacctcaagtacgatgcggagcgcgacctgcgggacatcgaagccacgggcatcgcggtgcacgcgctcagcaagatcaagtacggtgacaccactacctcagagggcgtcctcttcgccacctactccgccctgattggggagagccaggccggcggccagcaccgcactcgcctccggcagatcctggactggtgtggggaggccttcgagggcgtcatcgtgttcgacgagtgtcacaaagccaagaatgccggctccaccaagatgggcaaggctgtgctagacctgcagaacaagctgcccctggcccgcgtggtctacgccagcgccacaggtgcctctgagcctcggaacatgatctacatgagccgcttgggtatctggggcgagggcacacccttccggaactttgaggagttcctgcacgccatcgagaagaggggcgttggcgccatggagatcgtggccatggacatgaaggtcagcggcatgtacatcgcacgccagctcagcttctccggcgtcaccttccgcatcgaggagatcccgctggccccagccttcgagtgcgtctacaaccgcgcggccctgctgtgggccgaggccctgaacgtgttccagcaggcggccgactggatcggcctggagtcgcgcaagtccctgtggggccagttctggtcggcacaccagcgcttcttcaagtatctgtgcatcgcagccaaggtgcgccggctggtggagctggcccgagaggagctggcgcgagacaagtgcgtggtcatcgggctgcagtccacgggcgaggcgcgcacgcgggaggtgctgggggagaacgatgggcacctcaactgcttcgtctcggccgctgaaggcgtgttcctgtcgctaattcagaagcactttccgtccaccaagagaaagcgggacagaggagcgggcagcaagcggaaacggcgacctcggggacgcggggccaaagccccccggctggcgtgcgagacagcgggcgtcatccgcatcagtgacgacagcagcacggagtcggaccctggcctggacagcgacttcaactcctcccccgagtccctggtggatgacgacgttgtcatcgttgatgcagtcgggctccccagtgacgaccggggacccctgtgcctcctgcagagagacccgcatggccccggggtcctggagcgggtggagcggctgaagcaggatctgctggacaaagtgcggcggctgggccgggaactgccagtcaacaccctggacgagctcatcgaccagctgggcggcccccagcgggtggcggagatgaccggcaggaaaggccgcgtggtgtccaggcccgacgggacggtggccttcgagtcgcgggcagagcagggtctgtccatcgaccacgtgaacctcagggagaagcagcgcttcatgagcggcgagaagctcgtggccatcatctcggaggcctccagctcgggtgtctccctccaagccgaccgccgtgtccagaaccagcggcgccgcgtgcacatgaccttggagctgccgtggagcgccgaccgcgccatccagcagttcggccgcacccaccggtccaaccaggtctccgcgccagagtatgtcttcctcatctcggagctggccggggagcgccggttcgcctccatcgtggccaagcgcctggagagtctgggggccctgacccacggagaccgccgcgccacggagtcccgtgacctcagcaagtacaactttgagaacaagtatggcacccgggccctgcactgtgtcctcaccaccatcctgagccagactgagaacaaagtgcctgtgccccagggataccctggaggggtccccaccttcttccgggacatgaagcagggcctgctgtctgtgggcattggtggccgggagtcccggaatggctgcctggacgtggagaaggactgttccatcaccaagttcctgaaccgcatcctggggctggaggtgcacaagcagaacgccctgttccagtacttctcagacaccttcgaccacctcatcgagatggacaagcgggagggcaaatacgacatgggcatcctggaccttgctcccggtatcgaggagatctacgaggagagccagcaggtgttcctggctcccgggcacccgcaggacgggcaggtggtcttctacaagatcagcgtggaccgcggcctgaagtgggaggacgcctttgccaagtcgctggcgctgacgggcccctatgacggcttctacctctcctacaaggtccgcggtaacaagcccagctgcctgctggcggagcagaaccgcggccagttcttcacggtgtacaagcccaacatcggccggcagagccagctggaggccctggacagcctccgccgcaagttccaccgggtcaccgcggaggaggccaaggagccctgggagagtggctacgctttgtcgctgacgcactgcagccacagcgcctggaaccggcactgccggctggcgcaggagggtaaggactgcctgcaggggctgcggctgcggcaccactacatgctgtgcggcgcgctgctgcgcgtgtggggccgcatcgccgccgtcatggccgacgtcagcagcagcagctacctgcagatcgtgcggctgaagaccaaggacaggaagaagcaagtgggcatcaagatccccgagggctgcgtgcgccgggtgctgcaggagctgcggctgatggatgcggacgtgaagcgcaggcaggcgcccgccctgggctgccccgccccgcccgccccgcgcccgctggcgctgccttgcggccccggagaggtgctggacctcacctacagccccccggccgaggccttcccgccgcccccgcacttctctttcccggcgccgctgtccctggacgccggccccggcgtcgtgccgctgggcacccccgacgcccaggccgaccctgcggccctcgcgcaccagggctgcgacatcaacttcaaggaggtgctggaggacatgctgcgctcgctgcacgcggggccgccctccgagggcgcgctgggggagggcgcgggggcggggggcgcggcgggcggtggtcccgagcggcagagcgtgatccagttcagcccacccttccccggcgcccaggctcctctctgacacgcctttaggcgaaacatgccccaagacacagggaccgtttctcccctaggagcagcggtggggagcagggccaaggtcccctgaccactgctcagaggagccctaggccctggccgcagtgccttcagcgcccgacccgggcccccacctggtcagccctggcggggcccactcaggacagctgggggccggggcgtggcagggccctctctgtgcctctcctcccaagtaggaaggggctccgggtggctgctctgggactgggcacccacaagggctcagtgggcccaaacccttgaaatccgtgaaaccgggtggtcccaagagctagaaactcaggaaaccccaggtgctcagggccccgcgtctcgggggctccgtggggcagacccctgctaatatatgcaattctccctcccccagcccttccctgacccctaagttattgcccgctcacctctcccaggccccaggccgcggagctggcagggtggcgcctgcggtttctatgtatttatagcaagttctgatgtacatatgtaaaggacttttttaaatatatgtgccttttgcctacttc

SEQ ID NO: 193 - protein, 1309 aa, Homo sapiens
MREPLPGSASWGTPGPPSAGTMSQLQLWLQFEALNKDSSYFEDFSNISIFSSSVDSLSDIVDTPDFLPADSLNQVSTIWDDNPAPSTHDKLFQLSRPFAGFEDFLPSHSTPLLVSYQEQSVQSQPEEEDEAEEEEAEELGHTETYADYVPSKSKIGKQHPDRVVETSTLSSVPPPDITYTLALPSDSGALSALQLEAITYACQQHEVLLPSGQRAGFLIGDGAGVGKGRTVAGVILENHLRGRKKALWFSVSNDLKYDAERDLRDIEATGIAVHALSKIKYGDTTTSEGVLFATYSALIGESQAGGQHRTRLRQILDWCGEAFEGVIVFDECHKAKNAGSTKMGKAVLDLQNKLPLARVVYASATGASEPRNMIYMSRLGIWGEGTPFRNFEEFLHAIEKRGVGAMEIVAMDMKVSGMYIARQLSFSGVTFRIEEIPLAPAFECVYNRAALLWAEALNVFQQAADWIGLESRKSLWGQFWSAHQRFFKYLCIAAKVRRLVELAREELARDKCVVIGLQSTGEARTREVLGENDGHLNCFVSAAEGVFLSLIQKHFPSTKRKRDRGAGSKRKRRPRGRGAKAPRLACETAGVIRISDDSSTESDPGLDSDFNSSPESLVDDDVVIVDAVGLPSDDRGPLCLLQRDPHGPGVLERVERLKQDLLDKVRRLGRELPVNTLDELIDQLGGPQRVAEMTGRKGRVVSRPDGTVAFESRAEQGLSIDHVNLREKQRFMSGEKLVAIISEASSSGVSLQADRRVQNQRRRVHMTLELPWSADRAIQQFGRTHRSNQVSAPEYVFLISELAGERRFASIVAKRLESLGALTHGDRRATESRDLSKYNFENKYGTRALHCVLTTILSQTENKVPVPQGYPGGVPTFFRDMKQGLLSVGIGGRESRNGCLDVEKDCSITKFLNRILGLEVHKQNALFQYFSDTFDHLIEMDKREGKYDMGILDLAPGIEEIYEESQQVFLAPGHPQDGQVVFYKISVDRGLKWEDAFAKSLALTGPYDGFYLSYKVRGNKPSCLLAEQNRGQFFTVYKPNIGRQSQLEALDSLRRKFHRVTAEEAKEPWESGYALSLTHCSHSAWNRHCRLAQEGKDCLQGLRLRHHYMLCGALLRVWGRIAAVMADVSSSSYLQIVRLKTKDRKKQVGIKIPEGCVRRVLQELRLMDADVKRRQAPALGCPAPPAPRPLALPCGPGEVLDLTYSPPAEAFPPPPHFSFPAPLSLDAGPGVVPLGTPDAQADPAALAHQGCDINFKEVLEDMLRSLHAGPPSEGALGEGAGAGGAAGGGPERQSVIQFSPPFPGAQAPL

SEQ ID NO: 194 - DNA, 3448 bp, Homo sapiens
  source 1..3448: mol_type = other DNA
ctctttcgctccgtgtcccgctgctgctcctgtgagcgcccggcgagtccgtcccgtccaccgtccgcagctggtagccagcctgcccctcgcctcgactccctttcaccaacaccgacacccacattgacacctccagtccggccagccgctccactcgttgcctttgcatctccacacatggcgtcctccgcgcagagcggcggctcctccgggggacccgcggtccccaccgtgcagcggggcatcatcaagatggtcctctcagggtgcgccatcattgtccgaggtcagcctcgtggtgggcctcctcctgagcggcagatcaacctcagcaacattcgtgctggaaatcttgctcgccgggcagccgccacacaacctgatgcaaaggatacccctgatgagccctgggcatttccagctcgagagttccttcgaaagaagctgattgggaaggaagtctgtttcacgatagaaaacaagactccccaggggcgagagtatggcatgatctaccttggaaaagataccaatggggaaaacattgcagaatcactggttgcagagggcttagccacccggagagaaggcatgagagctaataatcctgagcagaaccggctttcagaatgtgaagaacaagcaaaggcagccaagaaagggatgtggagtgaggggaacggttcacatactatccgggatctcaagtataccattgaaaacccaaggcactttgtggactcacaccaccagaagcctgttaatgctatcatcgagcatgtgcgggacggcagtgtggtcagggccctgctcctcccagattactacctggttacagtcatgctgtcaggcatcaagtgcccaacttttcgacgggaagcagatggcagtgaaactccagagccttttgctgcagaagccaaatttttcactgagtcgcgactgcttcagagagatgttcagatcattctggagagctgccacaaccagaacattctgggtaccatccttcatccaaatggcaacatcacagagctcctcctgaaggaaggtttcgcacgctgtgtggactggtcgattgcagtttacacccggggcgcagaaaagctgagggcggcagagaggtttgccaaagagcgcaggctgagaatatggagagactatgtggctcccacagctaatttggaccaaaaggacaagcagtttgttgccaaggtgatgcaggttctgaatgctgatgccattgttgtgaagctgaactcaggcgattacaagacgattcacctgtccagcatccgaccaccgaggctggagggggagaacacccaggataagaacaagaaactgcgtcccctgtatgacattccttacatgtttgaggcccgggaatttcttcgaaaaaagcttattgggaagaaggtcaatgtgacggtggactacattagaccagccagcccagccacagagacagtgcctgccttttcagagcgtacctgtgccactgtcaccattggaggaataaacattgctgaggctcttgtcagcaaaggtctagccacagtgatcagataccggcaggatgatgaccagagatcatcacactacgatgaactgcttgctgcagaggccagagctattaagaatggcaaaggattgcatagcaagaaggaagtgcctatccaccgtgttgcagatatatctggggatacccaaaaagcaaagcagttcctgccttttcttcagcgggcaggtcgttctgaagctgtggtggaatacgtcttcagtggttctcgtctcaaactctatttgccaaaggaaacttgccttatcaccttcttgcttgcaggcattgaatgccccagaggagcccgaaacctcccaggcttggtgcaggaaggagagcccttcagcgaggaagctacacttttcaccaaggaactggtgctgcagcgagaggtggaggtggaggtggagagcatggacaaggccggcaactttatcggctggctgcacatcgacggtgccaacctgtccgtcctgctggtggagcacgcgctctccaaggtccacttcaccgccgaacgcagctcctactacaagtccctgctgtctgccgaggaggccgcaaagcagaagaaagagaaggtctgggcccactatgaggagcagcccgtggaggaggtgatgccagtgctggaggagaaggagcgatctgctagctacaagcccgtgtttgtgactgagatcactgatgacctgcacttctacgtgcaggatgtggagaccggcacccagttggagaagctgatggagaacatgcgcaatgacattgccagtcacccccctgtagagggctcctatgccccccgcaggggagagttctgcattgccaaatttgtagatggagaatggtaccgtgcccgagtagagaaagtcgagtctcctgccaaaatacatgtcttctacattgactacggcaacagagaggtcctgccatccacccgcctgggtaccctatcacctgccttcagcactcgggtgctgccagctcaagccacggagtatgccttcgccttcatccaggtgccccaagatgatgatgcccgcacggacgccgtggacagcgtagttcgggatatccagaacactcagtgcctgctcaacgtggaacacctgagtgccggctgcccccatgtcaccctgcagtttgcagattccaagggcgatgtggggctgggcttggtgaaggaagggctggtcatggtggaggtgcgcaaggagaaacagttccagaaagtgatcacagaatacctgaatgcccaagagtcagccaagagcgccaggctgaacctgtggcgctatggagactttcgagctgatgatgcagacgaatttggctacagccgctaaggaggggatcgggtttggcccccagccccgctcacgccagtccctcttcctctgccgggagggtgttttcaactccaaaccccagagaggggttgtagattgggtccagctttgcttcagtgtgtggaaatgtctcgtggggtggcatcggggctgcggggtggggaccccaaggctttctggggcagacccttgtcctctgggatgatgggcactgctatccacagtctctgccagttggttttatttggaggtttgtgggctttttttaaaaaaaaaaagtcctcaaatcaggaagaaacatcaaagactatgtcctagtggagggagtaatcctaacacccaggctggccgccagctggcacctgcctctatcccagactgccctcgtcccagctctctgtccaactgttgattatgtgatttttctgatacgtccattctcaaatgccagtgtgttcacatcttcgctctggccagcccattctgtatttaaagcttttgaggcccaataaaatagtacgtgctgtctgca

SEQ ID NO: 195 - protein, 910 aa, Homo sapiens
MASSAQSGGSSGGPAVPTVQRGIIKMVLSGCAIIVRGQPRGGPPPERQINLSNIRAGNLARRAAATQPDAKDTPDEPWAFPAREFLRKKLIGKEVCFTIENKTPQGREYGMIYLGKDTNGENIAESLVAEGLATRREGMRANNPEQNRLSECEEQAKAAKKGMWSEGNGSHTIRDLKYTIENPRHFVDSHHQKPVNAIIEHVRDGSVVRALLLPDYYLVTVMLSGIKCPTFRREADGSETPEPFAAEAKFFTESRLLQRDVQIILESCHNQNILGTILHPNGNITELLLKEGFARCVDWSIAVYTRGAEKLRAAERFAKERRLRIWRDYVAPTANLDQKDKQFVAKVMQVLNADAIVVKLNSGDYKTIHLSSIRPPRLEGENTQDKNKKLRPLYDIPYMFEAREFLRKKLIGKKVNVTVDYIRPASPATETVPAFSERTCATVTIGGINIAEALVSKGLATVIRYRQDDDQRSSHYDELLAAEARAIKNGKGLHSKKEVPIHRVADISGDTQKAKQFLPFLQRAGRSEAVVEYVFSGSRLKLYLPKETCLITFLLAGIECPRGARNLPGLVQEGEPFSEEATLFTKELVLQREVEVEVESMDKAGNFIGWLHIDGANLSVLLVEHALSKVHFTAERSSYYKSLLSAEEAAKQKKEKVWAHYEEQPVEEVMPVLEEKERSASYKPVFVTEITDDLHFYVQDVETGTQLEKLMENMRNDIASHPPVEGSYAPRRGEFCIAKFVDGEWYRARVEKVESPAKIHVFYIDYGNREVLPSTRLGTLSPAFSTRVLPAQATEYAFAFIQVPQDDDARTDAVDSVVRDIQNTQCLLNVEHLSAGCPHVTLQFADSKGDVGLGLVKEGLVMVEVRKEKQFQKVITEYLNAQESAKSARLNLWRYGDFRADDADEFGYSR

SEQ ID NO: 196 - DNA, 13761 bp, Homo sapiens
  source 1..13761: mol_type = other DNA
aaatcggcggctacccggcaccggcgcctggaggtaaaggtacccgggggtggggaaggcccctggccgcggcagagctccctgccaccggccctgtcctgcttgccgccccagcgcctgcgacgcttggatgcccccagctccggccgcgccaaccagaaactttgcccctcgaagtcccccgcctgcctgaccgcaccgtgaggcgccaagtcggccgcgcgccccccggggccccggaaccccgcgagtcattgcctggccgccccgtaccccgcgcccgcggcgcccggtagccaggatgcgctacgcggacccctcggccaaccgggatttgttggggagccgaactttgctcttcatcttcatctgcgcctttgccttggtgaccttgctgcaacagatcctgtatggcaggaactacattaagagaggcctccagtttggttggcagagtggtgaccagctgaccaattggacggggctctttaatgtcacggatgatccagcagtgcagagcggcagtgactccagctccaggtactttgaattttatgaggggccttttgaatataactccacaagatgcctggagctgaggcacgaaatattggaagtgaaggtgctgtccatggtgaagcagtcagagctgttcgacaggtggaagagcctccagatgtgcaaatgggcgatgaacatctctgaggccaaccagttcaagtctactctgtccaggtgctgcaacgcccctgcctttctcttcaccacccagaagaacactcccctggggacaaagctcaagtatgaggtggacaccagtggcatctaccacatcaaccaggagatcttccgcatgtttcccaaggacatgccctactaccggtcccagtttaagaagtgtgctgtagtgggcaacggaggcatcttgaagaacagccgctgcgggagggagatcaacagcgccgacttcgtcttccggtgcaacctgccccccatctcagagaagtacaccatggatgtgggggtgaagacggatgtggtcactgtgaaccccagcatcatcacagagaggttccacaagctggagaagtggcggcggccgttctatcgcgtgctgcaggtgtacgagaacgcgtcggtgctgctgcctgccttctacaacacgcgcaacaccgacgtgtccatccgcgtcaagtacgtgctggacgacttcgaatcgccgcaagctgtctactacttccatccgcagtacctggtcaacgtgtcgcgctactggctcagcctgggggtgcgcgccaagcgcatcagcaccggcctcattctggtcactgcggcgctggagctctgtgaggaggtgcacctctttggcttctgggccttccccatgaacccctcgggcctctacatcactcaccactactatgacaacgtcaagccgcgtcccggcttccacgccatgccctctgagatcttcaacttcctgcacttgcacagccgaggcatcctccgcgtgcacacgggcacctgcagctgctgctgatggctgccagccaggctgcccggcaagcggcgccccctctcctgctgtccctcctggtggaactgggagccccgaaccgggcagcgtggggtcctggcgttcaggctgtctctccctccattgttcagctctgtacttggatcctggggtagggaggcagggttaggaaccggggcagagtcagctctgtgctgagcctcctggcctggcccccaccggtgcatccgcccagtgcgtccacctgccctggctagcatgctgctgggccacaccccaagatcaggggccctggggacggcaagtgaataaagcacatttccacccaattttgtcatccgagagagagcacaaactgcaggcccttgttgcagctgaaggaagaccctacagagaatggaattgagagtggagacaggacacttcacaggacacttgagcacagtcaagattttattcacacttttggttcctgtgttttatatcgaagacttagctatgaattgctatctaaatctcagagcttagaagccaacccagtgactagaccttccagtgaagaaagtgatctcaagaggtccagggacttaacagccaagccacaccacccgacaggttcttctgtgacaccgagagatctaacccaaggcctgggttatgtcttagtcgagacatcatcatctgagaagcaccacatcctttcagacacatcctcggacacacatgcggtcttggtgcccccaggttcaatcctgcgttagctcttttgatgagaaggaaataaaccaaaccagccacttgcactatggcttccaagccaatgttattgactcaataagtgcttagcaattggcttcctcttttgtcttcctattttcagctccatttaaaccaggagttatttataaagacctcttcctctcatgtctctgaatcctgcagaatcctgctgtatcgtgttcctcagtcggaaccataggctctgggctggaaagcactgacatgtcaggtggtgagcttagcagagagaaacgagttgtggcctccgacaccagcatcactgaggcttccgctgtgaaggcgggacttctcacagcagaccccagggcctgggcttggggcagtcagctgggcttaggcagagaggggttcacatatcatttcacatctgaaattaattccctttgcttctccctgtggtgtttccaccataaatgggatggtgtctaagagacactgttggtgaactaactgccttagaacttagctttgtggaatcataggatgttagtgctgggaggaggacttcagcctacctgcctggcaacctgtctccctccctccttcctttctccctgcctcctcccctttctccttccctcccttcctcttttcttcctccccttaaacatttctggaaagcctattctgctttggtctgtggttggacttaggaagacataaggataaacaaaggcattatctgtgtcttctgggggtgcagggcccagagattatagacccagtcccacgtgctgggtgctctgggagggttaggagctgtaagagtctatcagggagtgggatctgctatccaatcacctcatttgacaggccccccggctgagccagtcagggacgtggagagtgcaggctttatcccaggcctccaggctcctgatccagggctccgttcttggccaaacttttgtgtcttggcttgggcttcctgtgggggggttgttgtggaacctgtgccctgtgcacaacactgttctcagtgctgactctcacctgcattctgagctctggtcctggttgggaaaacctcaggtggctctgagtctcagtctgctggtcaggaatgtaggggagtagccaaggggatgaaatgatcccaaacacctgctaaaccaggaagaactgcaaaggacagtggatggttattacttgcttgagctctgcctatttctcccagggagggaatttctgggaaagattccagttacctgagatttctagccactgcatggttaattgaacccagttcttgaaaccatggaatataaaaactagaaggttcttaaagaccattttgttccactttaggaaacaggcccagagcaaagatgtgactgggtcaagtcatgcctggggctctactgagtgcctgctgtggacagagccctctactggaagccctctgggtactagttatgttccagatgggcagtgtttgggggaggctccctggtgacacagacatcaggattcccacagctgagggtgttgcaggttggaatctgccccagccagggccctcgtaggagctgaggattggagcatcgggatccagcccacagaggagttgggacacctggctgctggccatattcctgcctgtgggtcttagggccagtccttcctctccctcaatgtctcagtttcctcatctctacaactagaagctttgtaaaaatcttcagcgtctgtacaatgtccttattttggggggacattcatgatgaatggatctaaaccataattaatatttctcattatactagctagcatttatcaagctacgttaagcactttccctatattatctcctgtaatcatcatgagacccctttgggtaaggaggctcccattgtacagatgaggagacagaggcttaaagcaattccaggacttgcccttggtcaggcacccaatggagggaacggcacccaatggagggaactgcacccagatctgtagagccccaaagtctgtgctccaaacctctgtcttagcttcccagacagtgacaccagaacatgagggatcctgaccaagatgcccctgcaggatagtacggggccctcctccagggacaaatgctctaggaggctgtcatcgtccgggaagcagcctgtgcttataggtgcctctccctaaccctgccgcctacagcagtagcgacttacccacagtggcactggaggggaactgaggccatcgtcacatttttaaggtgaggaaagatgcccagagatagcacatgttaagtgacaacacgaatgacttgcccagggctacatggccagcttgtggctcaactgggactcaccagtctcctgactttcaggatatagtttttctgctgcagccagtgtttataagaaaaacattttttcaaaggctcagagagacctggtgttgactctggaagccttctgccatgttcctccacagccctgtcaccacgccaccatgcagtgcagactacccattgaattattattcaagggaaatcgattcccgtaaacaaaacaaccatcatgtcttcctttgtgctaaacccactgctccaggcttgaaaggcagcaaaaacaagtaaatgactcagtgcttagccaagcacaaagaaaggtggctcaaggtcagaggcagcgtctgagaccatttcagcaatgctgctgcggcagctctgcccactaatcacctggtgcccagagacagcatgtgctcatcgcccttgactttgctgagagcagggaggaagcagagcagtgcttagaaacaactgaggcagagtagagtgctggccaatttagtgagtgaattggtgaataaattatatttattgagtgctcatgttgtgccaggcatggtgccaggtgccggggagctagtgatgaacaaaacgtcgtccctgccctccgggagtttgtggtctggtgtgtgtgtatacagacgttaaatgacgaatcccacaaacgtacgtgggagctggttgtgctgaacactatcaaatccagtctcagggacagttatctgggagaggtggaggaggggatgaccaaagtcaattccgaattctgaaggttggcagcataaaaagtgtaatgagcaaagcagcagatacttctcagatatcatccttgacatccgtgtaacatttgacaaggttggcctctctggtcttttttgtttgtttgtttgagacagagtctccctctgtcacccaggctagagggtggtgatataaatatggctcactgcagcctcgacacctgggttcaagtgatcctcccacctcagcttcccaagtagctaggaccacaggcacgtgccattgctcccagctaatttgaaaatttttttttttttgtagaaacggggttttgctatgttgacgaggctagtctcgaactcctgagctcaagcaatcctcctgccttggcctcccaaagtgctgggattacaggtgtgagccactatgcacagtctctctggtctttctaaagtcctctcctcttctgttttctaactattcttccctgactttcctcctgtctctctgaatgctccttctcaggttcctttgtggattcatcttccgtgaagcttcctcagggttctcttctcttcctaggagcattcctgcagaaatctcatctattcaaagccttaagtatcttctgccctggcatcttaacccctctacctgcaggccagtcctccctaggagcattggaagcatgctcactgtggcctcctgcatgtctgtgtctgcacagcatctcagacctcaacatgtcctcaactggtatagttaaaagaacaatctgaactcagagtctcctcctactacttcgtagctgtgtgaaattgagggagctccagaagcccctggaggctctggactcatcatctgaaatgaggacaggataccaaccacaacagctgttgcaaagctaagtgaaatagtgttgcacaatgcctagcacagtgcccagcacaaactagacactagcaagcacaggttgccttggcccaaaacttggatcacctttgcctcttccttctccttcactctttatgtctatttgttcactgtatcttgtcaattccaactcataaacatccctttaagtcattccctccctgcaacccctctgctactgccctaacccagaccatctgatggatctttttgctttcagagaataaccttccaaaaataccttttgtggggcccattgcctacctgtatcataaacttcaggttctttaccaagtcatgcagggaatgtcccaagctggcttactcaccttcccagagatcctcctgccacctccctgccctatcccatactattccaggcacctttgcacactctgttcaaacacctggaatggccctcacactcctaagttcctctctccttccttttatctggccacttttgcagaagtcaggtaatggccccctgcatcctcccctctagagacctgggctgggcactctctcctctgtgcttctgctgcaaccatcaccgactccattaggacatcctcacagcacacagcataagggcccgtgtgtccttgatagaaggtttgccttctccccaagggaagacacgatatctaagctcattttgtattgccagcactggcggggaagcacatgccatggccactcaacacatgtttactacagtaatgaggtctctggttcctgggggactccagcagttcaggataccccgctaataaactgagtaacaccttggggaaattgtcagctgaggagagtcctctattgatttttttacctagcacatcccaggaaggcagagactcctcctgcctgtccaggggagctcggggctcaggaggctgaaatgtctgtctagtgggggcttatgggcttggctagcctctttttgttttccctcattataatcctgctcatctgctttttgctggctagccaatcctttttcctctagtttaaatgaaagaagggagagacattttctgtgtttcttgttgtctacttcttcccttcctcaaagccacacaaacatgtcaggctcttacatcactgtggctgaggtgcagcctgggaagcaatgtaagagggatttatcaatggtgtttaaaaaactagaggaacatgctgaatgctttggctgggaaacaggtgagctgagctttgcaggatgtctgctccagatgcgaaggggaagaccaggagcatggggttgtttcctgggggaaaaaaggtgctgcttctctgagctcaacacacgccctgacctagtctcctccctgtaaccagagcaccctctgggaagaggctaactgtggctcaggggtcaggtgaggccaggcgaggggtgcaccagtggccagggtgtgccttgtgctattgtttagaggtctagtcaaacgaggccagtctgtggaggctgattccatcctacggggcatcctaataaaccagtgtgatcttcaaagggtagactggatagatctacagtgtgatcttcaaagggtagactggatagacctacagtatagatctacagtatagatctacagtctaccctttgaagatcacatgggtttattaggatgccctgtaggatggccttctgatggcctgcatcagaatcacctgggtgcttgttaaaactatggactgagaacctgggggagaggtggcgcctgggaatcagcatgtgtgaggccctatctgttccctgagcatacaactgcttgtggttcagaagttgccaccagttgagtggccatgtatggcttgaaattcagactggagccttgagtaggaaaagaatgaaaagaagaatttggcacacaacccaacttctgccttttctgtacatacaaatataatatataacccactatgtacctagcaacaaaagtcaagtgctcgggaatctaacatttacaaaattggttttgctttaacacaaacaaagatttctttttcatttgtaattatggtaaaatacacataacatagaatttatcatcttaaccatttttaagtgtacagttcagtaatggtaagtacattcacactgttgtatattctgtctctggaactcttctcatcttgcaaaatgaaaactttaaacccattaaatgacaagtcttcacttcccccttccccagcccctggcaatcgcaattctactttctttctctatgaattttactgctctaggtccctcatataagtagaatcatataatatttgtctttctgatgactggcttatttcacttagtatagtataccagagactttttagaatcacttaggtgcaagcagctctcaaatgacattaactgttttgggtgtccctaaagcagaaatctgatttttgtttttgtttttgccttgggcagttgtcctgggctggtcgttggcccctggcttcctgagaccttggccccttgctgagggagagtgcagacctggccttgctctgccacctgggctccactgtcctggccagcatgtcctgagagacaatagccttgctgatcttttagaagtctttaggtattttcccctgcacagtctcttctgagaacctttctttttttttttttttatttcaaaggaaaaaaaccaaaagcaaaaacatacacttccatgacttagctgttggccacaaaagccagaaatcagtgactctctcttcagttgaagatggttcccatggcaacaaatctctcatttccttcaactaaatgatctgctcagctttggggtaaaagttctgttttctctagaattgccatttgcaaccttgtgtgtacataggaatcacctggaagtctttataaaataatccccaagccaggtcctttacttcccggaggatctgattcagcaggcctggggatagggcctggtatccctattttgaaagatctcattaagtggttctgtctcacatggttgggagtcattaccctaaggcaggcagtctatgccttggtgcacgctagagtcgtctgaagagctttaagaaatactcgtgcgaccccaccccttgacattctgagtcaggtggtctgagatgtgacctgaatattaggatttcacaaattctccagatgtttctaatgtgcagccagccttgagaaccactattctaggtcagcagttctcaaactggaggctgcctcagaatctcttggagagctccttgattatgggccccgccccagagttatttggtgaggccagggtggagcatctctaacaagttcccaggtgatgccaatgctggtccagggactgcacttggaggctcatggctctagatgatcctttaatgagattggccctgttctgctgccctgttctttttcctggttgggggttggtggacccttccttccctcagtctgactcaggcgtgagacttcttaaaggtaccagcttttctttttctgaacattttagcattcagataaatattatgacatatttttaaagcaaagtaacatagatttcttctcccggggctaggagcctcagagtctgcctgaattaagaatttatctgtgcctaagattaggatgcatttagtgatctgagctaaggggttggtggatctgcagcaataggttcagcctgtgcctgggtgagggtcaccttgtgaccggcgctgggtaggatctgagtaccacacacttggccctctagcatggggaggacctgtctggtccacctgggggaaagcctggttttctgatgcagacccagccctctgcccacctccacatctgtgcacaaacatggaaggtagcaatgaggaaacacagcaccaggactgccgtgagcccaggagctagggttagagcctcacttctttatgcatttccttttctatcatactttggaacaggcttgagctgaaaccagagagttagtacctggtttctgcctcaatctagtctccctcctccaaagatgcccccacaacgtgggcaacttcaacccccatgagagctcagaattccacattcagcgacaaagttgacaagagcctctggagatctcaaagacttattaaaagtggaaatggctactgttttactgaggcagggtgaaaacacaactcacttcctaggatcgaacccagcaaattcactcagcccccaggtaactgaggactcagttgaaggaaaataattttgagcccctgaaaatagatgctataaagctgtgtatcaagggccaaccattttgctaatatcacatatctcacggcatttgctttgattttaaattcagttctagtgaacttggttctgatttctaatgacaaagcaaactaagagaatgatgacatgtgctagataaagcaagaagtggcagctaatagcctaaattgtgatggcattaagaagaccaaaactagtttacttgttcaacgacagcttgtctttggaaaaaaaaaaacactacattaaggataagaaaatatgtccaggcatggtggctcacatctgtaatcccagcattttgggaggctgaggcgggagatcgcttgagctcaagagttgacgaccaacctgggcaacatggcaaaaccctgtctcaataaagaatacaaaagcacacctgtagtcagtcccagctactcaagaggttgaggtgggagactggcttgagcccaggaggcagaggttgcagtgagctgagatcataccactacactccagcctgggtgacagagccagaccctgtctcaaaataataattaaaaaagaccaaaactaaatacatatctcaggaaccatcaagtagcctgaggtcgttggtcgtttagtggggaagagagggagaatatgttataataaccccgggagcaacacagcatttcagctcagttcaccctgtgacatccaggacatgcagaggtaaaaaagcgttccaacaatgttcaatacactgtctaagaaggcagggctgcgttttatccactttagaattatttccatccccaaacagttaaaatactttcacaaaagtcttggtgcttaaaagataaatgctcagtgacctggaagttcacataaatgaaacggttgatgatctgatgatgaaggataggcgagatgggtaaactcactctttttttttttttgagatggagtctcactctgtcacccaggctggagtgcagtggcatgatctcggctcacggcaacctccgcctcccaggttcaagtgattctcctgcctcagcctcccaagtagctgggattacaggcgcccaccactttgcccagctaatttttggtatttttagtagagacggggccaccattttggccaggctggttgtgaactcctgacctcgtgattcgcccacctcctcctcccaaagtgctgggattataggtgtgggccaccgtgcccggccaaactcactcttttgaacttaacattttccccctgacattggagactctcctgctacctctctcctaagaaaaaagggcaggtggtggggggacaagccccttccaccttcccatctccaagggactttgcagtgtgggtgatggtgtggctgatcatcctctttctgcacctctgattctgcttgtgttgtccttattgtgtggggcaggagggtcaggacttcagctaggggtgtgctggctctgcagtgactcaggcctgggtgttttttggtgaatttaaaaagatgaccatttctgggggaaagtgacacttttactttctccacaccttcaccatccattttcttactggacttcgctgcgttcctgcaaggaggacagggcagagagtagcaaccctccttgccgaggcccagaaagatagcgtggtgtgcccagggcacccatggtgggtgatggacatctccttttgggtgccaaggcttcctcaaggtgggaggaactggagggcaggggacggtggccagtgtcccgctctagccctctagggcacctttttctcccctctgaagttgttaggctgatctggagtctgctccaggcctgggcttcaccctggcctcatgccctgcccagcacctgtgtggagggacctgttcgtattcattcctctttgggggccaagctcagggcacccgaaccagcagccttgggtggctgaacctagtgggacagaagggaggcagttgtatctggcagagtcacccaaggccacaggcctgagcaaagcaggagagcggggcaagctggggtcagggaccatggtgctggccccctgctgctctggccatgtgggaggcagctggaggggtcccaagtggcagctcctgccagactaccccggactcccgagcccatcgtcctgtactcttctccagtgggacgtctggccctcactgtggctagcttctgggcaagtccctctgctcaagatcactttatggggcagctggtgccccctggggctcccacactctgcacatacaatttagggacctggcagggtcttggtggcctgcagcttccctttctggaaccgactcgcctcccatcagagagccataactcttcttcaatacagtattgtttgaactttgaaatatatgcatttgtctatgtattttcttaaaaattaacactgtatctcaataagcatacaatggattgttcaatggtacagtttggaaccaatcccccgccacttccctccccaagtaaagccaggacagatgctggagtcagcatgggagctgtggaaaccttttgccctggagccaggtgcctgtggctgtgcctgggagtggcttcagcccaggcgtggtgtcagtttcctggcacccctgcccaggagcctgcatgaaggcagccgggtctctctctgagtggctggtgcaccggctcatttctgagtggcctcctgcgtatgaagaaaaagcggccacgtggcatgcctcccttccctcccttgctttcctctcaaagagccaagtcacgctgcactgcgctccgtggagcctttcccgatggagaagagaagggaggcctgagatgtcctttgctgggatgtggagaaacaccatctatatgaaaagccccttgcttgctctgctgattttctccctcccctggccctggagagaaaggctgtgccattcaaagacagtttggggacatgggggctgcaggcctgatcttatttttatgcaaattttgttctgggagcagtggtttatacaaactcctgtagcataattccagcttgtgtgtggctgtccttgagtagtgattctgaagtgatgactgtgatgctatgcctaaaaacatcatcagggtactttgtatctgtcactgtgtttgaacggccctcaatttctatctaataaaaccagtcaaatggttcaccta

SEQ ID NO: 197 - protein, 412 aa, Homo sapiens
MRYADPSANRDLLGSRTLLFIFICAFALVTLLQQILYGRNYIKRGLQFGWQSGDQLTNWTGLFNVTDDPAVQSGSDSSSRYFEFYEGPFEYNSTRCLELRHEILEVKVLSMVKQSELFDRWKSLQMCKWAMNISEANQFKSTLSRCCNAPAFLFTTQKNTPLGTKLKYEVDTSGIYHINQEIFRMFPKDMPYYRSQFKKCAVVGNGGILKNSRCGREINSADFVFRCNLPPISEKYTMDVGVKTDVVTVNPSIITERFHKLEKWRRPFYRVLQVYENASVLLPAFYNTRNTDVSIRVKYVLDDFESPQAVYYFHPQYLVNVSRYWLSLGVRAKRISTGLILVTAALELCEEVHLFGFWAFPMNPSGLYITHHYYDNVKPRPGFHAMPSEIFNFLHLHSRGILRVHTGTCSCC

SEQ ID NO: 198 - DNA, 2935 bp, Homo sapiens
  source 1..2935: mol_type = other DNA
agtctccggggactttcccaggggtggggcggcccggccaggcccccggcacttcctcgtcctcggcccgggtgccctgcccccgtccaggagccctaggagtgctacggggggccggagccttgcccgggccgctgccccgtccctggattcggggctggacgcagcaagcggggcgctgtgtccccaagctccccgtcctcggccaggcgggcaccacggcaggggctgagctaccctcatggaagggagaggaccgtaccggatctacgaccctgggggcagcgtgccctcaggagaggcatccgcagcttttgagcgcctagtgaaggagaattcccggctgaaggaaaaaatgcaagggataaagatgttaggggagcttttggaagagtcccagatggaagcgaccaggctccggcagaaggcagaggagctagtgaaggacaacgagctgctcccaccaccttctccctccttgggctccttcgaccccctggctgagctcacaggaaaggactcaaatgtcacagcatctcccacagcccctgcatgccccagtgacaagccagcaccagtccagaagcctccatccagtggcacctcctctgaatttgaagtggtcactcctgaggagcagaattcaccagagagcagcagccatgccaatgcgatggcgctgggccccctgccccgtgaggacggcaacctgatgctgcacctgcagcgcctggagaccacgctgagtgtgtgtgccgaggagccggaccacggccagctcttcacccacctgggccgcatggccctggagttcaaccgactggcatccaaggtgcacaagaatgagcagcgcacctccattctgcagaccctgtgtgagcagcttcggaaggagaacgaggctctgaaggccaagttggataagggcctggaacagcgggatcaggctgccgagaggctgcgggaggaaaatttggagctcaagaagttgttgatgagcaatggcaacaaagagggtgcgtctgggcggccaggctcaccgaagatggaagggacaggcaagaaggcagtggctggacagcagcaggctagtgtgacggcaggtaaggtcccagaggtggtggccttgggcgcagccgagaagaaggtgaagatgctggagcagcagcgcagtgagctgctggaagtgaacaagcagtgggaccagcatttccggtccatgaagcagcagtatgagcagaagatcactgagctgcgtcagaagctggctgatttgcagaagcaggtgactgacctggaggccgagcgggagcagaagcagcgtgactttgaccgcaagctcctcctggccaagtccaagattgaaatggaggagaccgacaaggagcagctgacagcagaggccaaggagctgcgccaaaaggtcaagtacctgcaggatcagctgagcccactcacccgacagcgtgagtaccaggaaaaggagatccagcggctcaacaaggccctggaggaagcactgagcatccaaaccccgccatcatctccaccaacagcatttgggagcccagaaggagcaggggccctcctaaggaaacaggagctggtcacgcagaatgagttgctgaaacagcaggtgaagatcttcgaggaggacttccagagggagcgcagtgatcgtgagcgcatgaatgaggagaaggaagagctgaagaagcaagtggagaagctgcaggcccaggtcaccctgtcaaatgcccagctaaaagcattcaaagatgaggagaaggcaagagaagccctcagacagcagaagaggaaagcaaaggcctcaggagagcgttaccatgtggagccccacccagaacatctctgcggggcctacccctacgcctacccgcccatgccagccatggtgccacaccatggcttcgaggactggtcccagatccgctacccccctccccccatggccatggagcacccgcccccactccccaactcgcgcctcttccatctgcaccagttttgtcgcagccggaatacacctggcgtctaccctgtggaggggttcgaaatccaaatcagagctcccaagtgatggaccctcccacagccaggcctacagaaccagagtctccaaaaaatgaccgtgaggggcctcagtgagaccagattgtgtcatttggctccaccttcatcttgcagagccagctgatctcagattgccaagaaactagaagccacttgcacggtgtggccagagcctcagctggatgagaggctgagatgggtggccagcttgtacaccagtccctgaactgagctgtttacaggactggggaggctccacccagaaggctttcatttgtactctgctgggagtgactgggaaaaactccttccctgctgctgagtggagagaggcctcatccggctttgacccaccatccgttgcagaagcctccaggagcagcaatcctaagagtgggaggcagccaagacccccttccttcaaaacctcccggaagtggtttcaggccctctagttgccatgaccaatttgtgtgtgtgtttaatttttgcttcaagctctgtagcaggacctgccccacgcacacccctacccctctgtgaggagctgtgggaagtgtgggtttgtctccagaacagaagagaatgatggatattctggctctggggccctctccaccaccactcacagtagccttgctgaagccatcacagatgggagaaggccatgccagccacgtccgccgaggggcgccagcctgaagctgccaggccctgaggttcagaccctggaccccatagctggaggcctgtggtgccagaagcccagattagggtggctgtccatccctggatagctatttgcacgaatcatggacataaatccaagttgaagaagatc

SEQ ID NO: 199 - protein, 636 aa, Homo sapiens
MEGRGPYRIYDPGGSVPSGEASAAFERLVKENSRLKEKMQGIKMLGELLEESQMEATRLRQKAEELVKDNELLPPPSPSLGSFDPLAELTGKDSNVTASPTAPACPSDKPAPVQKPPSSGTSSEFEVVTPEEQNSPESSSHANAMALGPLPREDGNLMLHLQRLETTLSVCAEEPDHGQLFTHLGRMALEFNRLASKVHKNEQRTSILQTLCEQLRKENEALKAKLDKGLEQRDQAAERLREENLELKKLLMSNGNKEGASGRPGSPKMEGTGKKAVAGQQQASVTAGKVPEVVALGAAEKKVKMLEQQRSELLEVNKQWDQHFRSMKQQYEQKITELRQKLADLQKQVTDLEAEREQKQRDFDRKLLLAKSKIEMEETDKEQLTAEAKELRQKVKYLQDQLSPLTRQREYQEKEIQRLNKALEEALSIQTPPSSPPTAFGSPEGAGALLRKQELVTQNELLKQQVKIFEEDFQRERSDRERMNEEKEELKKQVEKLQAQVTLSNAQLKAFKDEEKAREALRQQKRKAKASGERYHVEPHPEHLCGAYPYAYPPMPAMVPHHGFEDWSQIRYPPPPMAMEHPPPLPNSRLFHLPEYTWRLPCGGVRNPNQSSQVMDPPTARPTEPESPKNDREGPQ

SEQ ID NO: 200 - DNA, 10910 bp, Homo sapiens
  source 1..10910: mol_type = other DNA
agttttgtttcttttccaggcacccagcaacggcggcctccaggcctcaggccccctcaccatcctagaggtcaagatcagctctggctagttctcacaggtctgacccaacaagtagcactgacatttttacgtttgctggatgtacacacggaagtggaggaggaggaggagaaggaggagggcagctccttagctcaagagcaagtggcccaaggcctcagaagactagaaggaagttcctggccattcagcatggtttcccacgggtcctcgccctccctcctggaggccctgagcagcgacttcctggcctgtaaaatctgcctggagcagctgcgggcacccaagacactgccctgcctgcatacctactgccaagactgcctggcacagctggcggatggcggccgcgtccgctgccccgagtgccgcgagacagtgcctgtgccgcccgagggtgtggcctccttcaagaccaacttcttcgtcaatgggctgctggacctggtgaaggcccgggcctgtggagacctgcgtgccgggaagccagcctgtgccctgtgtcccctggtgggtggcaccagcaccggggggccggccacggcccggtgcctggactgtgccgatgacttgtgccaggcctgtgccgacgggcaccgctgcacccgccagacccacacccaccgcgtggtggacctggtgggctacagggccgggtggtatgatgaggaggcccgggagcgccaagcggcccagtgtccccagcaccccggggaggcactgcgcttcctgtgccagccctgctcacagttgctgtgcagagagtgccgcctagacccccacctggaccacccctgcctgcctctggctgaagctgtgcgtgcccggaggccgggcctggagggactgctggccggtgtggacaataacctggtggagctggaggcagcgcggagggtggagaaggaggcgctagcccggctgcgggagcaggcggcccgggtggggactcaggtggaggaggcggctgagggcgtcctccgggccctgctggcccagaagcaggaggtgctggggcagctacgagcccacgtggaggctgccgaagaagctgctcgggagaggctggcggagcttgagggccgggagcaggtggccagggccgcagccgccttcgcccgccgggtactcagcctggggcgagaggccgagatcctctccctggaaggggcgatcgcacagcggctcaggcagctgcagggctgcccctgggcaccaggcccggccccctgcctgctcccacagctggagctccatcctgggctcctggacaagaactgccaccttcttcggctgtcctttgaggagcagcagccccagaaggatggtgggaaagacggagctggtacccagggaggtgaggagagccagagccggagggaggatgagccgaagactgagagacagggtggagtccagccccaggctggagatggagcccagaccccaaaagaggaaaaagcccagacaacccgagaagagggagcccagaccttggaggaggacagggcccagacaccccacgaggatggaggaccccagccccacaggggtggcagacccaacaagaagaaaaagttcaaaggcaggctcaagtcaatttcccgggagcccagcccagccctggggccgaatctggacggctctggcctcctccccagacccatcttttactgcagtttccccacgcggatgcctggagacaagcggtccccccggatcaccgggctctgtcccttcggtccccgggagatcctggtggcggatgagcagaaccgggcactgaaacgcttctccctcaacggcgactacaagggcaccgtgccggtccctgagggctgctccccttgcagcgtggccgccctgcagagcgcggtggccttctccgctagcgcacggctctatctcatcaaccccaacggcgaagtgcagtggcgcagggccctgagcctctcccaggccagccacgcggtggcggcactgcctagcggggaccgcgtggctgtcagcgtggcgggccacgtggaggtgtacaatatggaaggcagcctggccacccggttcattcctggaggcaaggccagccggggcctgcgggcgctggtgtttctgaccaccagcccccaggggcatttcgtggggtcggactggcagcagaatagtgtggtaatctgtgatgggctgggccaggtggttggggagtacaaggggccaggcctgcatggctgccagccgggctccgtgtctgtggataagaagggctacatctttctgacccttcgagaagtcaacaaggtggtgatcctggacccgaaggggtccctccttggagacttcctgacagcctaccacggcctggaaaagccccgggttaccaccatggtggatggcaggtacctggtcgtgtccctcagtaacgggaccatccacatctttcgggtccgttctccggacagttaaaggggctaggactagggtgagagggagtggggagggagagggcaggaaggaggcagagctgtccgtgggaggtggaggccgaggacattttcctgaagggcaggggttggcaacttttcaacatggagtgccaaactgctaacccgtcttctagtgtgtgagaatagggaccaaggtggtggcgtgaccttaactctcagaagcagaggaggcaggtgggtggagggggatgctgggagttcacctgcctcttgctttttgtgggtggctgctgccaccaccgccgctgctatatagtttaggtttctgaggtttgtgagcctgtcctgctttgcattcttcaaaaccattcctgatagagtagccgagggagagtcttggggccaagaagggcccagggtgggtcaggcgtgtgcactgtggaacagagctgagaccccggccccccttggactggcacagggtcctacagagtcagaggaggcctgagatttcgaatgggcagtgaatggcctcttctgccagccacaggcaggatgctccttgatcacggcatcccccggcggtagtacagggtgagcttgcaggagggtctgcaagtgcagacagcagctggggccaaagaggtgttaggttcaaaggctgcgaagagaataggctactggaaaaccaaacccaacagaattcacgtccaaaaatccacattctccatcgcttctcagccttttggctaagattaagtattaaaaaaaaaccaggctctgccaggcgcagtggctcatgcctataatcccggcactttgggagtctgtggcaggaggattgcttgaggccaggagtttgagaccagcctgggcaacatagcgagaccccatctctacaaaagattaaaaattagctgcgtgtagtagcatatgcctttcaacgtagctactcaggaggctgaggtgggaggatcccttgagccgaggagtttgagtctgcagtgagctatgatcgcaccactgcattccagaccccatctcgaaaaaaaaaaaaaaaaaaaaaaacagaaacaacagaaaaagcaggttatccatcacttctcagctaagatcaagtgttaaaataaataaataaataaataaataaataaataaataaataccaagttatgagtgtcagagcaggggagccctccacgcagccacggagccagtctgagggaagaggtacataggatagaaaaatctctaggctccaacgcttctgcttcggtgtctttccatttcccagggtctatgtgttgccttctcttcattttccagcaaaattccttttgagatatgttggccttcactcggctgaactagggggtgaaggaaggttgtcctctgtgggccactattgctggggaaacagctaaaccctgcaggccaagtggaacttggaggtgccaagaaaacctagaaggtgcaatggggctgcgacggatagaggtgtcaaaccagaagggaggaacccgtcggaggtgggctgtgaccaccggaccttttcataagtggtggcagtggtagaattgagggggcaagtaggcttggagaatgtttttagccaggggctgttgagagatggcagaagggggtcttaatgtggggactgtggacagtggggcattcgtgggaaccagagggattttggacaagtccagatggaatgtgcagggcataggtagagggaaaagaaaatccctttctgggaaaaccatttcttgtttattgaaacaatgcaggacatcatcaaagtccgggtggacacattccattatctacaaattacaaaggtaggcacagcaaagaataatgaagattataagaaaaccaagcgccaggcacggtgactcaagcctgtaatcccagcactctgggaggctggggtgggtggatcactcaaggtcaggagttcgagaccagcctggccaacatggagaaaccccatctctactaaaaatacaaaaattagctaggcgtgggagcgggcgtctgtaatcccagctacttgggaggctgaggcaggagaatcatttgaacccaggaggtggaagttgcagtgagctcagatcgcaccattgcactccagcctgggtaacaagaatgaaactccatctcaaaaaaaaagaaaaagaaaagaaagaaaaccaaggtccctctccctctccctctccccacggtctccctctgcctctctttccatggtcacggtctccctctgatgccgagccgaagctggactgtactgctgccatctcggctcactgcaacctccctgcctgattctcctgcctcagcctgccgagtgcctgcgattgcaggcgcgcgccgccacgcctgactggttttcgtatttttttggtggagacggggtttcactgtgttggccgggctggtctccagctcctaaccgcgagtgatccgccagcctcggcctccggaggtgccgggattgcagacggagtctcgttcactcggtgctcaatgttgcccaggctggagtgcagtgtcgtgatctcggctagctacaacctccacctcccagccgcccgccttggcctcccaaagtgccgagattacagcctctgcccggccgccaccccctctgggaagtgcggagtgtctctgcctggccgcccattgtctgggatgtgaggagcccctctgcccggctgcccagtctgggaagtgaggagcgcctcttcctggccgccatcccatctaggaagtgaggagtgtctctgcccggctgcccatcatctgagatgtggggagcacctcagccccgccgccccgtctgggatgtgaggagcgcctctgcccggccgcgacccagtctgggaggtgaggagcgtctctgcccagccgccccgtctgagaagtgaggagcccctccgcctggcagccgccccgtctgagaagtgaggagcccctccgcccggcagccgccccgtccgggagggaggtggggggtcagccccctcccggccagccgcgccgtccgggagggaggtggggggtcagcccccgcccggccagccgcgccttccgggagggaggtgggggatcagtccccgcccggccagccgccccgcccgggagcgaggtggggggcgcctccgcccggccgctgtcccgtccgggaggtggggggtcgcctctgcccggccgccccgtctgggaggtgaggagcccctctgcccggccaccaccccgtctgggaggtgtacccaacagctcattgagaacgggccatgatgacgatggcggttttgtggaatagaaaagggggaaaggtggggaaaagatagagaaatcagattgttgccgtgtctgtgtagaaagaagtagacatgggagacttcattttgttctgtactaagaaaaattcttctgccttgggatgctgttaatctaagaccttacccccaaccccgtgctctctgaaatatgtgctgtgtccactcagggttaaatggattaagggcggtgcaagatgtgctttgttaaacagatgcttgaaggcagcatgctccttaagagtcatcaccactccctaatctcaagtacccagggacacaaacactgcggaaggccgcagggtcgtctgcctaggaaaaccagagacctttgttcacttgtttatctgctgaccttccctccactattgtcctatgaccctgccaaatccccctctgcgagaaacacccaagaatgatcaataaaaaattaaaaaaaaaaaaaaaaaaagaaaaccaagaagatgggaaaaccatgcagaattgatttgacgaggaaagccttggtctctaatacatgcaatgactagaacagtatttggtcaaagaaccacataagctctgtaccctggaggaaatgtatgcaggcaaggactagtaaaataaaaaataataataattaaaaaaaaaaaaaagaaaggctggacgcggtggctcacacctgtaatcccagcactttgggaggctgaggtgggtggatcacctgaggtcaggagtttgagaccagcctggccactacggtgaaaccccatctctactaaaaatacaaaaattacccgggtgtggtggcgcatgcctgtaatcccagctactggggagtctgaggcaggagactcgcttgaacctgggaggcagagggtgcagcgagccgagttcaccccattgcactccagcctgggtgtcacagtgagactctgtctcaaaaaaataataaataaataattaaatccacttgcagtggtcaaaaataaatgttaaataaatgggtgagaaatcttgcggagaaatagactcctggcactataaaaatgatcctggagaataatttggctagactttgcaagaatgacaaaaatgattataagaatcagttgtctcactttggggaatacattctgggaaaataatgtaagagaaaaaatatttgcatacagacatttgaggctgctctgtatattacaggcaagaactggaaactgttcggctgcagggtgacagctaactagattgtggtttattaggggaatgagcctttctttgtgtatgacaactatgaaaactattgagaagaaatagttacgtgatacagtcataatcctcaaaaacggagaatcaggaattatgatcaaatagtgatagtaacaaggaaaacatctgtctaaataattactgagtagaaataggttcggaatttgtaaatagtcattaatttgggagattggggttttttttgttttgttttttgtttgtttttcattattttgtgctattattcatacgtgtacatttctacttcagtttttattatccattacataacatacatgcttgattatttgcttcaaggaaatacacctttataagtaatactcaataactactgggtttgagaatgaaggtgtcagaacgaatgagattgtcctatgaaagaagaggcaggagccagggaggaggatcccacccggccggggctcagccaggaggcagggccattggggcagggtggcagtccaaggaaccgctctgggaaggtttgcaaaggtcggggtcccccctgccaggtgatcgaattatcgtggagtgtctggaaggcgggggaagttttgttgagttcaccaaataactcagaccaactggaaaccaagtggagtttctacaggaccaactagaatagggatcagctacatgggggcggggggaggggggcagggaacggtgtctgtcttcattgcagctctgtctgcagagccagcactgtgatacctcatagtaggtgctcagtgaatgtctgtgaagtgaattactatctagacaaggatgagactggtatgactctccaaagctttcccacctccaaaacctcggcttgtggggaatctccagtagggggcactgtggacacggttcgcatctgcctcccaaggctgggctccgcgtcaaaaaaaaaaaaaaaaaatgagactgagccaggtgcagtggtcactcctgttatctcagcactttgcgtggccaaggcgggaggatgtcttgaggccaggagttcaagactaggctgggcaacatagcaagaccccatctctacaaaaaaatttttaaattagccagaggtggtggcatgcacccgtagtcccagctgctcgggaggctgaggcagaagattgctcgagcccaggagttcaaggctgcagtgagctctgattgtgccactgcactccagcctgagtgacagagcaaaacctggtttcctaagggggggataaaagagggagagatgagatcggggtgtcccgcttctgtgcatgtggagggggtaactgggaaccgtgtactgtaggggatcgcacaccttggggtggaaacagcagctctccggagttgcatgggagccatgggcagtggtcctggctggtgaaatgattctagccacgtggcccacccagggggcaaaacaatagaaaccttcagaaatgaaacgtcacctggctgcaagaagatagtcccacaggcgccctagagatggggatgccaagtggcttctcgggaagctgtaagaatccacagggcattgtaagatggagggaaatattaagttttcttcgtaaagaggtgaggggggcgagagcagcaaaggacactggaaaatgagaagcatggatgggaagtgttgcattgagcataatttggaggtaaaatctccaacaccgtaactgagtggcctggggacctgatagaaagccctgctcaggactaaggcagagttcccagttatatcgcagatacaaagagaccaggaacacgcttgtaatcacagcacttagggaggctgaggcgggtggatgacctgaggtcaggagttcgagaccagcctagccaacatggtgaaacccccatctctactaaaaatacaaaaattagccaggcgtggtggcacatgcctgtaatcccagctactcaggaggctgaggtgggagaatcgcttgagcccgggaggcaggggttgcagcgagctgagatcgtaccactgcactccagcctgggcaacagagtgagaccctgtctcaaaaagaaaaaaaaaaaagagagaaatcaggaacatcatgaaagatacagcaaaatgttttaccccagcccactgcaccacacctgggattgtgacaattaacttgataaattgttccttttcctgttcggaactgactaggttgtgcgtggatggaccagtgaaaagaaaatcctgtttgggtagggaagagggaagtagaaaacctctttcgtattcttggtgtcaagaaatgggaagagaatgagggagcagagacctgggttgagtgttggctctgcactaaacagctgtgtgatcttggtctagtgccttaacctctctgagcctcagtttgtacatcagtaacattgggataatgacatccacatgcccacttcacagagctgctgtgaggactggatgagaaatgtagagaagtatttcggacaccataaagctcaaatacaaggtgttggttaggaaaagtttcaactgacttgtacccacctgatacccctccatcagcataagcgtgtatgaggatgttaggtacatgtgttgtgagtgaaagctctggaacacccgagtagagctttctgcaaatcagcttctccttcagaggagaccattttgttttgctttccagcagttacttgaagaagccttatctgaagtcacaacagtgacttcaggaatagaagggaccaatggccagcttgctgaaatgtaatgccattcttaaaagccagctaagaatcagaccgtattagttaaggacccataagagtagacatttagaaaaagtgaaaaatggcaagagtggcccaatcttttgagagtttagagaaaatatcatttggaaagggagtagctctccttctattttagccttattattacggtatctataaagcaatgccatattctaaatctgcagaaataaaattctaaggggcgaaagtccaaggcagaagtcaaaagttttgcaaggaaaccgatgaggttgctgacctgagctgggcagggttgaacaggcgagtgccaagatcaaggtctctgattgtctctccttgaaaggtaagcagagaactagggctatcccataaattaagtgggagattggaaaggggtgcggacttctgtattggggagaaggtcttggatgaactggggcagagaactgccagagagagtacctaggaatacgttgttagcaggagaaagaccaagttcagatgcagacttgggaaagtaggtaacttgaccaaaggtagcaaaattagactacccaactggattgtgaatgcagtttatgaaatggatcaggacaggagcaaaaatagattttctagaaactgcagactcctgtgattggagcagtatacaaagtacagcaacatcagactagatctcacctgaggtgctgggtgagaaatcttagggaccagatggaagagggcctgtgtataaagacattaggaaggaggtttgggagggcagcctgacttgtctccagagaaagttagaactggttgacttagcaaccaagggacactgggtcaaagacgaggaatcaggacgtcggtgcctagtgactgagcgccagcccagcccatttctctacattgccatgggctaaacccagtgtgctgtaaactcttcagttcctttggttatggattttgtatcttttctgtgtttcttaataaagttcttttgaaaaatgggaacctttctcagatgggaattttgtatctttcctctgtttcttaataaagttcttttgaaaaattggaa

SEQ ID NO: 201 - protein, 755 aa, Homo sapiens
MVSHGSSPSLLEALSSDFLACKICLEQLRAPKTLPCLHTYCQDCLAQLADGGRVRCPECRETVPVPPEGVASFKTNFFVNGLLDLVKARACGDLRAGKPACALCPLVGGTSTGGPATARCLDCADDLCQACADGHRCTRQTHTHRVVDLVGYRAGWYDEEARERQAAQCPQHPGEALRFLCQPCSQLLCRECRLDPHLDHPCLPLAEAVRARRPGLEGLLAGVDNNLVELEAARRVEKEALARLREQAARVGTQVEEAAEGVLRALLAQKQEVLGQLRAHVEAAEEAARERLAELEGREQVARAAAAFARRVLSLGREAEILSLEGAIAQRLRQLQGCPWAPGPAPCLLPQLELHPGLLDKNCHLLRLSFEEQQPQKDGGKDGAGTQGGEESQSRREDEPKTERQGGVQPQAGDGAQTPKEEKAQTTREEGAQTLEEDRAQTPHEDGGPQPHRGGRPNKKKKFKGRLKSISREPSPALGPNLDGSGLLPRPIFYCSFPTRMPGDKRSPRITGLCPFGPREILVADEQNRALKRFSLNGDYKGTVPVPEGCSPCSVAALQSAVAFSASARLYLINPNGEVQWRRALSLSQASHAVAALPSGDRVAVSVAGHVEVYNMEGSLATRFIPGGKASRGLRALVFLTTSPQGHFVGSDWQQNSVVICDGLGQVVGEYKGPGLHGCQPGSVSVDKKGYIFLTLREVNKVVILDPKGSLLGDFLTAYHGLEKPRVTTMVDGRYLVVSLSNGTIHIFRVRSPDS

SEQ ID NO: 202 - DNA, 3958 bp, Homo sapiens
  source 1..3958: mol_type = other DNA
agccacttccctgcaggctgagcggagccctggatggagcttggcacccaagcccctcatgtctgccctgctgagtctgtgttttgtgctgcccctggcggcccccggccacggcacgcagggttgggagccctgcacagacctgcgccccctggacatcctggcggaagtggtcccttctgatggcgccacaagcgggatcaggatagttcaggttcacggtgcacggggactccagctctcagtagccgccccccgcaccatgagcttcccagcatccaggattttctcccagtgtgacctcttccctgaagaattttccatcgtcgtaactttgagagttcccaatcttccacccaagaggaacgagtacctgctgacggtggtggcagaggagagcgacctgctgctgctcggcctgcggttgtcacctgcccagctgcacttcctgttccttcgcgaggacacggccggcgcctggcagacccgagtgtccttccgcagcccggccctggtggatggccgctggcacacactggtcctggctgtgtccgcaggcgtcttctccctcaccacggactgcggcctcccggtggacataatggccgatgtgcccttcccagccaccctgtcagtgaaaggagctcgattcttcgtcggcagccggaggagagccaaaggcctgttcatgggactggtgaggcaactggtcctgctgccgggctcagacgccaccccaaggctgtgtcccagcaggaacgccccgctggcggtgctgtccatcccacgggtcctgcaggctctcacggggaagccagaagataacgaggtgctaaaatatccctatgaaaccaacattcgagtgacgctgggaccccagccaccgtgtaccgaggtggaagacgcccagttctggtttgatgccagccggaagggcctgtatctgtgtgttggcaacgagtgggtctccgtgttagcagccaaagaaagactggactacgtggaggagcatcagaacttgtccaccaactcagagaccctgggcattgaggtgttccgcatccctcaggtggggctctttgtggccacagccaatcgcaaagccacatccgccgtctacaagtggaccgaagagaagttcgtctcatatcagaacatccccacgcaccaagcacaggcctggaggcatttcaccatcgggaaaaagatcttcctggcagtggctaattttgaaccagatgagaagggtcaggagttctctgtcatttacaaatggagccacagaaagctgaagtttaccccatatcagagcattgccacacacagcgcccgagactgggaggccttcgaggtggatggggagcacttcctggcggtggccaaccaccgggaaggcgacaaccacaacatcgacagtgtcatctacaagtggaacccggcaacccggctcttcgaggccaaccagaccatcgccacctccggcgcctacgactgggagttcttcagtgtggggccctactcgttcctggtggtggccaacaccttcaacggcacctccaccaaggtgcactcgcacctctacatccgactcctgggctccttccagctcttccagtccttcccgacgttcggtgctgcagactgggaggtcttccagatcggggagaggatcttcctcgctgtggcaaacagtcacagctacgatgtggagatgcaagtccagaatgattcctatgtcatcaactccgtcatctacgagctgaacgtgaccgcgcaggcctttgtcaagttccaggacattctcacctgcagtgctctggactgggagtttttctcggtgggagaagattatttcctggtggtggccaactccttcgatgggcgtaccttctcggtgaacagtattatttacaggtggcagggctacgagggcttcgtggcggtgcacagcctccccaccgtcggctgcagggactgggaggccttcagcaccacggctggtgcctacctcatctactccagcgccaaggagcccctctccagggtcctgcggctgaggacacgctgaggccgcggctgcccggcagcaactggggtggccaggtggggcgggaccccagcacctcccccaactgaccctggacgtccaggtgggcccagcctagggcatcccgggcctgggcatcaggcagggtgcaggtggggccatctgcggccctggttcgggcagggacatccatccacctctgagtccttctgagccacagccccagtgacggtctggtcttgcaggcagaggcccagagcccctgccagtgctcgcccatctgagtgtcaagcggggatttcgctgtcaaggaaccgtttctatacatttttacctcaaacaacaggacctcggttcatgtccctgcggctggcctctcgccagccactcctgcagtgtgcgtccggccgcctgagcaggtgtggtgccgtcccgccattgccgccacctatttattgtgttttatctgaacggaagtgtatttatactgctctttacaaaagcaccggtgctcctctctaggcagcgggtgggcacagcccctcaccacggacacggacagaggaccacctccccatacagagagaggcttccctcccagcctcagtttacccgtaaatgcactagcgcgaggtcagaaatcacaagcctgggcatggcctgggtcgcaccccctccccacggccccacccacagggacctcaacttctgggcccgggattttttccctattcagcagcattttaatcacatgtcctccagctgactgggactcaggctgcgtgcctccgtctgcctgtgtgctggctgtcctagctccctggtaacagcatcctctgctggctctcctgtggtcatcttgtctctgcagctgggagagctgcttgtctgtccgtcacaggcagtgaggatgagagggggtgatgggcgcaaggccccaggggtcctccctcttaacccatgtaggtgccagagaaaccacccccactccatgagaagaggctcagacagcaggctccggggccacgcagcccagaccacacctgccacggtcttccaggaacggtgctcctgcttctgcaacacaaatcggaacaggagcgatcctcagagagtttacaatgtgctttttccgccaatcagaactgtggacaaaacttcctatttcctacaccgcagctgtctgttcaccttcagctcagagagcactcctgacctttcgtaatgaaatggaagcctccccttgtctggcaaataataaactcagtgtctacttttgccggctttgggaccttcgtgtttttccggggctcaggtctcactccagccatcgctgtggccagtggagagccactcccctctgggggcagtcgccgagagcctccttcccctccgtccagccagcaaggctttcccaagcgtcctgggcaggagggttgggccctgctttccaccaagtcactcagaaggtcccaatcacacatgattggcctcattgggtcagcacctgtgaaaggaagattaaaaactcgacaccccaattcactcaaccaagaagaaaaaagctgaaagctgagtcctgcaggaagctgcctttccctttgccctaagcagacagctgcagatgagagggtcagcatctccactagtggctgctctgtgtgccccttatctcatggaaagtgccaatttactgagcacgagataaacaggtaactgactgttcccacctgctccttttctcctgcagcatggagcaatcagtcatgtgaccacaccctcctccctctgccccctccagccggcttttccccttgactgaagccttcaacatcatcttgggagagaggcacagacctgtctcctgggtgcatccttagccttggcaaaataaacttctccattgatcga

SEQ ID NO: 203 - protein, 669 aa, Homo sapiens
MSALLSLCFVLPLAAPGHGTQGWEPCTDLRPLDILAEVVPSDGATSGIRIVQVHGARGLQLSVAAPRTMSFPASRIFSQCDLFPEEFSIVVTLRVPNLPPKRNEYLLTVVAEESDLLLLGLRLSPAQLHFLFLREDTAGAWQTRVSFRSPALVDGRWHTLVLAVSAGVFSLTTDCGLPVDIMADVPFPATLSVKGARFFVGSRRRAKGLFMGLVRQLVLLPGSDATPRLCPSRNAPLAVLSIPRVLQALTGKPEDNEVLKYPYETNIRVTLGPQPPCTEVEDAQFWFDASRKGLYLCVGNEWVSVLAAKERLDYVEEHQNLSTNSETLGIEVFRIPQVGLFVATANRKATSAVYKWTEEKFVSYQNIPTHQAQAWRHFTIGKKIFLAVANFEPDEKGQEFSVIYKWSHRKLKFTPYQSIATHSARDWEAFEVDGEHFLAVANHREGDNHNIDSVIYKWNPATRLFEANQTIATSGAYDWEFFSVGPYSFLVVANTFNGTSTKVHSHLYIRLLGSFQLFQSFPTFGAADWEVFQIGERIFLAVANSHSYDVEMQVQNDSYVINSVIYELNVTAQAFVKFQDILTCSALDWEFFSVGEDYFLVVANSFDGRTFSVNSIIYRWQGYEGFVAVHSLPTVGCRDWEAFSTTAGAYLIYSSAKEPLSRVLRLRTR

SEQ ID NO: 204 - DNA, 3411 bp, Homo sapiens
  source 1..3411: mol_type = other DNA
cccgactaagtgacttaaactcccacctactcctggaataaggagtcaaagcccggataggcgcagtattctaccttgtaaatactgttatttgtatatactgtaaatgatgacatcggtgggcactaaccgagcccggggaaactgggaacaacctcaaaaccaaaaccagacacagcacaagcagcggccacaggccactgcagaacaaattagacttgcacagatgatttcggaccataatgatgctgactttgaggagaaggtgaaacaattgattgatattacaggcaagaaccaggatgaatgtgtgattgctttgcatgactgcaatggagatgtcaacagagctatcaatgttcttctggaaggaaacccagacacgcattcctgggagatggtcgggaagaagaagggagtctcaggccagaaggatggtggccagacggaatccaatgaggaaggcaaagaaaatcgagaccgggacagagactatagtcggcgacgtggtgggccaccaagacgggggagaggtgccagccgtggacgagagtttcgaggtcaggaaaatggattggatggcaccaagagtggagggccttctggaagaggaacagaaagaggcagaaggggccgtggccgaggcagaggtggctctggtaggcgaggaggaaggttttctgctcaaggaatgggaacctttaacccagctgattatgcagagccagccaatactgatgataactatggcaatagcagcggcaatacgtggaacaacactggccactttgaaccagatgatgggacgagtgcatggaggactgcaacagaggagtgggggactgaagattggaatgaagatctttctgagaccaagatcttcactgcctctaatgtgtcttcagtgcctctgcctgcggagaatgtgacaatcactgctggtcagagaattgaccttgctgttctgctggggaagacaccatctacaatggagaatgattcatctaatctggatccgtctcaggctccttctctggcccagcctctggtgttcagtaattcgaagcagactgccatatcacagcctgcttcagggaacacattttctcatcacagtatggtgagcatgttagggaaaggatttggtgatgtcggtgaagctaaaggcggcagtactacaggctcccagttcttggagcaattcaagactgcccaagccctggctcagttggcagctcagcattctcagtctggaagcaccaccacctcctcttgggacatgggctcgacgacacaatccccatcactggtgcagtatgatttgaagaacccaagtgattcagcagtgcacagcccctttacaaagcgccaggcttttaccccatcttcaaccatgatggaggtgttccttcaggagaagtcacctgcagtggctacctccacagctgcacctccacctccgtcttctcctctgccaagcaaatccacatcggctccacagatgtcgcctggatcttcagacaaccagtcctctagccctcagccggctcagcagaaactgaaacagcagaagaaaaaagcctccttgacttctaagattcctgctctggctgtggagatgcctggctcagcagatatctcagggctaaacctgcagtttggggcattgcagtttgggtcagagcctgtcctttctgattatgagtccacccccaccacgagcgcctcttcaagccaggctccaagtagcctgtataccagcacggccagtgaatcatcctctacaatttcatctaaccagagtcaggagtctggttatcagagcggcccaattcagtcgacaacctatacctcccaaaataatgctcagggccctctttatgaacagagatccacacagactcggcggtaccccagctccatctcttcatcaccccaaaaggacctgactcaggcaaagaatggcttcagttctgtgcaggccacgcagttacagaccacacaatctgttgaaggtgctacaggctctgcagtgaaatctgattcaccttccacttctagcatcccccctctcaatgaaacggtatctgcagcttccttactgacgacaaccaatcagcattcatcctccttgggtggcttgagccacagtgaggagattccaaatactaccaccacacaacacagcagcacgttatctacgcagcagaataccctttcatcatcaacatcttctgggcgcacttcgacatccactcttttgcacacaagtgtggagagtgaggcgaatctccattcttcctccagcactttttccaccacatccagcacagtctctgcacctcccccagtggtcagtgtctcctccagtctcaatagtggcagtagcctgggcctcagcctaggcagcaactccactgtcacagcctcgactcgaagctcagttgctacgacttcaggaaaagctcctcccaacctccctcctggggtcccgccgttgttgcctaatccgtatattatggctccagggctgttacatgcctacccgccacaagtatatggttatgatgacttgcagatgcttcagacaagatttccattggattactacagcatcccatttcccacacccactactccgctgactgggagggatggtagcctggccagcaacccttattctggtgacctcacaaagttcggccgtggggatgcctcctccccagccccggccacaaccttggcccaaccccaacagaaccagacgcagactcaccataccacgcagcagacattcctgaacccggcgctgcctcctggctacagttacaccagcctgccatactatacaggggtcccgggcctccccagcaccttccagtatgggcctgctgtgttccctgtggctcctacctcttccaagcagcatggtgtgaatgtcagtgtgaatgcatcggccacccctttccaacagccgagtggatatgggtctcatggatacaacactggaagaaaatatccacccccttacaagcatttctggacggctgagagctaatttggcccaaggctgggggctgtgttttgtgtgtgtgtataaatttgcactgaagtcttgtttcagaaaccagaccactgaggagagcctgctgagctgaggccatggcctgcgtggcttggggaaatgagttggtggataccttctgggcttttgaacttgcccctcccccatttccctctcccccatgtgtctgaccctgtcttacccatttcaagttcaagcggtgcagcaccttcgaagcatcaatgcacacacctgctgttgcttttgatttctggaaggcatgtagtttcaacttgtaacaaaaatatttgtagtcttcaataaactgtggtatttctttagctaac

SEQ ID NO: 205 - protein, 983 aa, Homo sapiens
MMTSVGTNRARGNWEQPQNQNQTQHKQRPQATAEQIRLAQMISDHNDADFEEKVKQLIDITGKNQDECVIALHDCNGDVNRAINVLLEGNPDTHSWEMVGKKKGVSGQKDGGQTESNEEGKENRDRDRDYSRRRGGPPRRGRGASRGREFRGQENGLDGTKSGGPSGRGTERGRRGRGRGRGGSGRRGGRFSAQGMGTFNPADYAEPANTDDNYGNSSGNTWNNTGHFEPDDGTSAWRTATEEWGTEDWNEDLSETKIFTASNVSSVPLPAENVTITAGQRIDLAVLLGKTPSTMENDSSNLDPSQAPSLAQPLVFSNSKQTAISQPASGNTFSHHSMVSMLGKGFGDVGEAKGGSTTGSQFLEQFKTAQALAQLAAQHSQSGSTTTSSWDMGSTTQSPSLVQYDLKNPSDSAVHSPFTKRQAFTPSSTMMEVFLQEKSPAVATSTAAPPPPSSPLPSKSTSAPQMSPGSSDNQSSSPQPAQQKLKQQKKKASLTSKIPALAVEMPGSADISGLNLQFGALQFGSEPVLSDYESTPTTSASSSQAPSSLYTSTASESSSTISSNQSQESGYQSGPIQSTTYTSQNNAQGPLYEQRSTQTRRYPSSISSSPQKDLTQAKNGFSSVQATQLQTTQSVEGATGSAVKSDSPSTSSIPPLNETVSAASLLTTTNQHSSSLGGLSHSEEIPNTTTTQHSSTLSTQQNTLSSSTSSGRTSTSTLLHTSVESEANLHSSSSTFSTTSSTVSAPPPVVSVSSSLNSGSSLGLSLGSNSTVTASTRSSVATTSGKAPPNLPPGVPPLLPNPYIMAPGLLHAYPPQVYGYDDLQMLQTRFPLDYYSIPFPTPTTPLTGRDGSLASNPYSGDLTKFGRGDASSPAPATTLAQPQQNQTQTHHTTQQTFLNPALPPGYSYTSLPYYTGVPGLPSTFQYGPAVFPVAPTSSKQHGVNVSVNASATPFQQPSGYGSHGYNTGRKYPPPYKHFWTAES

SEQ ID NO: 206 - DNA, 2135 bp, Homo sapiens
  source 1..2135: mol_type = other DNA
gttaccgaaatgctgccttagagcgtaatttgcaggaaagaggaagttttgttttaaaccagatcttcaagagttgaagcatattgaagaaggaaaagaattctgaagcaactgcagggtaaaggcagcagtaatgctaacgctagcaagtaaactgaagcgtgacgatggtctcaaagggtcccggacggcagccacagcgtccgactcgactcggagggtttctgtgagagacaaattgcttgttaaagaggttgcagaacttgaagctaatttaccttgtacatgtaaagtgcattttcctgatccaaacaagcttcattgttttcagctaacagtaaccccagatgagggttactaccagggtggaaaatttcagtttgaaactgaagttcccgatgcgtacaacatggtgcctcccaaagtgaaatgcctgaccaagatctggcaccccaacatcacagagacaggggaaatatgtctgagtttattgagagaacattcaattgatggcactggctgggctcccacaagaacattaaaggatgtcgtttggggattaaactctttgtttactgatcttttgaattttgatgatccactgaatattgaagctgcagaacatcatttgcgggacaaggaggacttccggaataaagtggatgactacatcaaacgttatgccagatgataaaaggggacgattgcaggcccatggactgtgttacagtttgtctctaacatgaaacagcaagaggtagccccctctcccgtcctcatgctccctctcagtcccctggattgccccagtcctgtgaccatgttgccctgaagaagaccatcttcatgactgctcattgtagatggagaattcaacataaatacagcaagaaaatgtgtttgggcttctgaagagttgtctgcttaccttaacatgtttacttttttgaacttgtactgtataggctgttggtgaaattcttaagaagttgtaatgaactcaaaattgaggccagagcttgctttcccttttcccaaacaaaattggttttctgcacaagcgatgctaatgatgtgttcagtgtaactcgcagattggcaataagatacccgctacaaactgtgattggatgcaaaatctcttagcttctttcacgaatgttggccctgcctagatgttgtgaagcctcccagaatgcatagagtcattcactgtagatctcttattgaaatgcgtattttatttaatgtaagtatattttggaacagatttgtaatttgtacaattcaatgctttaattattttttctattctcatttagtttgtattttcattgtatagagcagacagaaagatgttgggtcaagcaactattgaagagaaatacaaagaaaatatgaaaggcacattattcattttgtccaaatgcaatgagaatctcactcttaaaaatcagctcttgctttcgggtccggatgtggtgagcacattttggagccctttgaagctagatttggatgatcaaaacaaaaaggcagggagcccattctaacatgctgcccagaggaaactggctggagcctggaccagctggggttgatgcttttgcagtggtcatgtgattgtgacctggtagctacttatcagagagccagaccctgctgtcctgggagacaggagcgatgcctcaggaatcagcccaatgtctgatgtcactgagactgtacctgtggccttcttctgagtttgctatggctccaggccctgccggtggggtgagcctcctaggccttggaggaccaggagtcaacagtggcatatgccatcctcggccaggttaatatactgcagaggaaaagccctgaagagaggcaagtggatttactccagcatgtagacatttgaaccagtgaaatcaaacacaaaataaatgtctgtctagtttcatttgctgcctgcctaacactctcaaacttaactgccagcttccttagacctctggattcccccatctgccatctactgggtttagtttgtttttcttaatttatagaatctctgattgtgagatcagtctgtcacggagacccagcaggtgaggaatgtaggccttgcttcctctttgcacccatta

SEQ ID NO: 207 - protein, 185 aa, Homo sapiens
MLTLASKLKRDDGLKGSRTAATASDSTRRVSVRDKLLVKEVAELEANLPCTCKVHFPDPNKLHCFQLTVTPDEGYYQGGKFQFETEVPDAYNMVPPKVKCLTKIWHPNITETGEICLSLLREHSIDGTGWAPTRTLKDVVWGLNSLFTDLLNFDDPLNIEAAEHHLRDKEDFRNKVDDYIKRYAR

SEQ ID NO: 208 - DNA, 3007 bp, Homo sapiens
  source 1..3007: mol_type = other DNA
agtatgcaggtcgctgcagggacccgaggcgacacgcgcctgcaggaggtggcactcctgccgcagctcttcgatctgcttgtccttggccagcggcgcgctcgcctgctccgacaggtcccgagcgcgctggcgggcaaagacttggcacagctccaggccggcgcaactctcgccgggtataggcgcgctcacggcccggaggagcttgaagaaatccgcaaatgtgggatgaaaaacttccgtaacatccaggttgatgaagctaatttattgacttggcaagggcttattgttcctgacaaccctccatatgataagggagccttcagaatcgaaatcaactttccagcagagtacccattcaaaccaccgaagatcacatttaaaacaaagatctatcacccaaacatcgacgaaaaggggcaggtctgtctgccagtaattagtgccgaaaactggaagccagcaaccaaaaccgaccaagtaatccagtccctcatagcactggtgaatgacccccagcctgagcacccgcttcgggctgacctagctgaagaatactctaaggaccgtaaaaaattctgtaagaatgctgaagagtttacaaagaaatatggggaaaagcgacctgtggactaaaatctgccacgattggttccagcaagtgtgagcagagaccccgtgcagtgcattcagacaccccgcaaagcaggactctgtggaaattgacacgtgccaccgcctggcgttcgcttgtggcagttactaactttctacagttttcttaatcaaaagtggtctaggtaacctgtaaagaaaggattaaaaatttaagatgttctagttctgctctctttgttttaaaaatcactgcttcaatctacttcaaaagaatggtgtttcttttcttgtccaattttatccaaaatcttcaagttacatttaacccataaggtttaaaaaaaaggaaaaaaaacggttgtggttccctttcttccctacccttgccactcccactttctggcaccgagtttatttttcacttacttacttccccagaccccgggctcgcctccacaaaggagaagagactgccctggcggtcctggtggcttttcttagcatgtgtggcactgttgcccagtgtgggagttggtttaaattctcctgactccagtttataacatccttttaaaaaatttaaaaacaaacagccacacccctcctccagtccttctcctcagttcttgtgtgaaactccagctgatgttaccacagtaacatcagttaattgggcaagccctgatgtcagtgtgtgtaactgacctctggcctggcctgcacagagaagccctataatcacaggtctgtggtggccccgaaatggggggcctgctagtcaggaggatgctgtgcacactgtgtgtgatgaatctcgccagaaaggctcctgaggtcccaggttggcacttctccctgcagccattgtagaagatctgctggtccttgcaggcaaagctacagccagaatgtccgtttgaaactcctagctcatctgtcaccgagcttcatccgaatgtgccacggagcttgctctccacttcctccgtgcagtggccctgccacagccctccctcggcacactttgaccctttgtaggattggaattagcaggactcggctatttaaagcaccagtctggggtcgcctgggcccctgctgaccccctcctccagagcagccagcccagcccgggaacaagacggacttcctctcccttcggactcacagcctttgcagagtcaagctccacttgaagctcactcagtaatatcctttcaatgtgttttatattgttttgactgcctttttttgtagaaataaaaattgaccttagaatttatcgtcagataaacttgtaaagatttgaatattaatgtcttttcaaggcaaatgggattgtccccgcactagtagagaatccatgtcgctctgacaccccaaggaagccgacgatccaaatgccgtgtgtcaccaaccccgcttctgccactggcggcttcccttcttggctcttgggggggactagatcctgtggagaagatgacttaaactttgctttttgttttaattttaattctataacttgagatctttccggggcctacaggcgtgtaagacagcttggtctggtctgtgcagaagtggggagtgatgggcaggttcggcagcctaacattgttcaggcgcatggcccctgcggtgtgtacacgaactcggcttcttttgtcctaggtacgccaagggcaggtttctggagactcccttgtgcccgggatggcaagggcaccgggctggcgtttccacatctgtcttcattagcagaaaagtgatgatggattttatttcactcacactccagtttgtaataaaatgccaaattctgtcagctatccaaacaagccaccatttgttcttgttgcttctctggatccagaaatgttgccattcttggaaactgtcccattgcttcgtatttctgccaacgtagctctgcctgcctgtcaacccctcactgcactctgctcatcacgggaggatacctgtgtgccggcagcccctcagggactctcagccctggcactggcaccccagggttggccccgtcagcagaggcttggctttcgagccagtgggtgtctctcctttgggcctgggcggcttgctcctgccagccatgccttcagggtaggctctgagcaagctggcgaacagccctggctgctccaaaaccaaaaagctgggtcctctggaggaggggcgagctgtggagcagccacccactgctgccccaagctcactcaggaattcacacccgcctggtttcttgaagtgtgctgggtccttccctctgctccctactccccaccacggcagagaataggctttctaagatgctgcgatcccgttctgctgcccgtaataaaaatgctctcagacactg

SEQ ID NO: 209 - protein, 212 aa, Homo sapiens
MQVAAGTRGDTRLQEVALLPQLFDLLVLGQRRARLLRQVPSALAGKDLAQLQAGATLAGYRRAHGPEELEEIRKCGMKNFRNIQVDEANLLTWQGLIVPDNPPYDKGAFRIEINFPAEYPFKPPKITFKTKIYHPNIDEKGQVCLPVISAENWKPATKTDQVIQSLIALVNDPQPEHPLRADLAEEYSKDRKKFCKNAEEFTKKYGEKRPVD

SEQ ID NO: 210 - DNA, 4607 bp, Homo sapiens
  source 1..4607: mol_type = other DNA
gtcagctgatgggctgcctgccgaggaggccgcagcagtcgccgcgcgaacatggcggccgaaatccactccaggccgcagagcagccgcccggtgctgctgagcaagatcgaggggcaccaggacgccgtcacggccgcgctgctcatccccaaggaggacggcgtgatcacggccagcgaggacagaaccatccgggtatggctgaaaagagacagtggtcaatactggcccagcatttaccacacaatggcctctccttgctctgctatggcttaccatcatgacagcagacggatatttgtgggccaggataatggagctgtaatggaatttcacgtttctgaagattttaataaaatgaactttatcaagacctacccagctcatcagaaccgggtgtctgcgattatcttcagcttggccacagagtgggtgatcagtaccggccacgacaagtgtgtgagctggatgtgcacgcggagcgggaacatgctcgggaggcacttcttcacgtcctgggcttcgtgtctgcaatatgactttgacactcagtatgctttcgttggtgattattctgggcagatcaccctgctgaagcttgaacagaacacgtgttcagtcatcacaaccctcaaaggacatgaaggtagtgtcgcctgcctctggtgggaccctattcagcggttactcttctcaggagcatctgacaacagcatcatcatgtgggacatcggaggaaggaaaggccggacgctgttacttcagggccatcatgacaaggtgcagtcgctgtgctaccttcagctcaccaggcagctcgtctcctgttcctcggacggcggaattgcagtgtggaacatggatgttagcagagaagaggctcctcagtggttggaaagtgattcttgtcagaaatgtgagcagccatttttctggaacataaagcagatgtgggacaccaagacgctggggctaagacaacatcactgcaggaaatgcgggcaggctgtctgcgggaagtgcagcagcaagcgctcaagttacccagtcatgggcttcgagttccaagtccgggtttgtgattcttgttacgactccatcaaagatgaagatcggacttctctagcgacctttcatgaaggaaaacataacatttcccacatgtccatggacattgccaggggactgatggtgacctgtgggaccgaccgcattgtaaagatctgggacatgacacctgtggtgggctgcagtctggcgactgggttttctccgcactgatctgagagctgggcggcgtccacacctaagaacagcagctccaccaaatgaagtccctctcacgcagctccacagcgctgtctcgtgaatggacagtagccacttacaaacaaatcaacatttttaaaaagaaaatgtaaaggtgtgttttggggcatttgtggaacttacccatggggactaatatggaaaaggtctgtccatagtggttccctgaagactggaattacttcagcaaaacttccccatgaacagctaatgtgtagtgaaagaatgagctagcaaatgagttttagcggggacaaaaaatcaaacaaaaaagtgaatgcttagaaccttctcaaagcagtcacaagtacagacacttcacttagcctagggggccttccagggttcttgtggctgttgtcagagcaggagctgggggagggaagacttgttctctctttcttgaggggtggcattaggaacttacgaaaccagagacctttccctatgacttggcagtatgtgaatatcctctacacttagttattgataaacttcttaaagagatctgttattttcaggtagtgccataatctgcacttagcattggcttgcttcagttgtttctcttcccagccagtatgccacaggtgaactttcggggttgtcattaagtaagttgtgaaatttctgtaataacaaaggcagtccgcattcttccctttcccccaaattcctagggcaaaacttttttatggtgctgttaacatgggagtcacacaagccgcctgactttttctcattgccattagtaatgactgatggaaaacccagccaccactgtgatgcgaaatgatcagtctgttgcctgaaacagcccagtcctcttaactgaaacagcattctacttcttgttccaagatgagcctctgcaatattctggcaatttaatataccccctacaaaagcactccacagcttttacactattttgactttgagttataactagtattattcatgttttcataaaaagaagttagtgacccagagctataatcatccatcaagtcttccacaataattcccaactcataaattgctttcctaacaactagcaaaagctattgttcataatggcatttctaaagcttttgggcactgtgtaccaggatgaggaagagaagaaatgaggagcctgtcttttaatattccagtatttgtgtgtttgattttttttgacaacagtacatatatctatttctctagggatatggaagtaagtggagaagggcctacctttttaaaggacaaatataaaaatagcaacagtatctttgctaatcttactaatagatattgattaaaaaaaaaaaacctcagtactgcatcactgtgttgggatcataccaggacaatagggtcattccatatgataaaactaaaggactaaatttgttttataatgatgtcttagagggactgaaaggtttaaggaggcgatcaaactaaaatgtcttaatggctgtgtgacacacgtaaggaaaggaaagggggtcacgcacatcatgtactggaatgatctgcattaaacatagacttgtcttcagaaataagactgaagggttttgttgttccttagagttttcgtgttacatcacctaaagagatttcttttaaaaactttctagactctttgcaaaatgtatattactaacatagtttggaagaaaaattgagtagtggtaagttttgttcaagcacaatgttgaatgttaagcttcctgtattaattttagttcagttaatggttcagcccatacaaaggtgctatcctagggattttatgaattcctgaaaggaaaatagaatatgatcaattccttgccctgtggaagagtgcagaactgtggttttgttttcctttgacttctgtaaaatgtgaccgtttgacatctgtggtagattgaacggaatatcacagctgctgagtttactccatagctttcaaaccttttttattttaagaaattcttgaaaaaccctatgttccatgggaacataaagttattatagtgcctcctaaggggttaatataaatcaaggaggaagtttatatttaaggaagaattggagtgacgtatcttagaaaaggaaaggctgatgtttccatatagcttgctctccaccaggcctatcatttttctttttagagacaaacgtgacaggctagtcttgtctctctcatatgctaggtagcaaatggggtgatatttttatagaagtgggcaaaaattattttctcaattttactgagtaggcacagaagaaaagtacagataggctgatggttattgccttattttgactgcatttctcttaaatggatcatttaaattagttcttcaagtaacagtttactggttgttccattcctgaatatgcaggctaatttgtacagatagggattaaggaatacagactattagagaagatccttatatttacatctagtatatatgtggtaaggaaatgccgattcttcattataaacaagttttaaaattgttctttcttagttcaaatgatagcaatacccctatagcattaggtagaaacaaattattcattacatcgtaaatctctttactatgtcctagctctgtcctgctacctaaaggatataaagaaatactattgctctagaatgtattactttgttctcccatgaaagaattcagtttgttagtacctatatttttaaactggtgaaactgacccaaatatgtaataaataccatagtagctcagacccaaggagatatttttctaaaatcagttttcgttaaagtacttctacttccgttattggatatggtatctcctaaagtgtaaaaaaaatctgttactatatagtgataaaccatctgctcatcgtaagtgtaaggcttaacaaataagtaatacatgctatatttattcaagtgtctattgcttaattgttaattgtgagcagatttattgaatgcctattctattttctgcagtttacaatacaataactctttgagtaagttgaagtttaattgtgcaacaaatttgtattagagtacaatttaaagtgtttttctctatagccttttttgactggggaagcaaggggtaatgttaattagtacactttgttcttgtactagctatgtttctataagatatggtgccctgtgtatcccagagatgctagaaaactgttctttgctcctatttgtgggttctgtttttgtgggtttttttttttgagaaaatgtacacaataaaacattccttgcttgtta

SEQ ID NO: 211 - protein, 410 aa, Homo sapiens
MAAEIHSRPQSSRPVLLSKIEGHQDAVTAALLIPKEDGVITASEDRTIRVWLKRDSGQYWPSIYHTMASPCSAMAYHHDSRRIFVGQDNGAVMEFHVSEDFNKMNFIKTYPAHQNRVSAIIFSLATEWVISTGHDKCVSWMCTRSGNMLGRHFFTSWASCLQYDFDTQYAFVGDYSGQITLLKLEQNTCSVITTLKGHEGSVACLWWDPIQRLLFSGASDNSIIMWDIGGRKGRTLLLQGHHDKVQSLCYLQLTRQLVSCSSDGGIAVWNMDVSREEAPQWLESDSCQKCEQPFFWNIKQMWDTKTLGLRQHHCRKCGQAVCGKCSSKRSSYPVMGFEFQVRVCDSCYDSIKDEDRTSLATFHEGKHNISHMSMDIARGLMVTCGTDRIVKIWDMTPVVGCSLATGFSPH

SEQ ID NO: 212 - DNA, 7452 bp, Homo sapiens
  source 1..7452: mol_type = other DNA
gacgtcaaattcaagatggatggaatcacagcggcagcggcggctgcggcgcgcgcgagccgagtgtgagcggaaaggggcccggcgtctgcctcgagactgaagaccgaagacatgaagtagaaacaatccaggaaggctttgggaagctatttgtgtgcgaggatcaaagtgataaactcaagccatggagggattactgcattacatcaaccctgcacacgccatttctctcctaagtgccctgaatgaggagcgtctcaaaggacagctgtgtgatgtgctgctgattgttggagaccaaaagttccgagctcataaaaacgtcttggctgccagcagcgaatactttcagagtttattcacaaataaggaaaatgagtcacaaactgtatttcagcttgacttctgtgagccagatgcttttgataatgttttaaactacatttattcttcctctctatttgttgagaagagcagccttgctgctgtgcaagaacttggctatagtcttgggatttcctttctgactaacatcgtttctaaaacacctcaagccccctttccaacgtgtcctaatagaaaaaaagtgtttgtagaagatgatgaaaacagttctcaaaagagaagtgtcattgtttgtcaaagtagaaacgaagcgcaaggaaaaactgttagtcaaaatcaacccgatgtaagccatacttcccggccctctcctagcattgcagtcaaggccaataccaataagccacatgtcccaaaaccaatagaaccacttcataatttgtcattaactgaaaagagttggccgaaagatagttctgtggtatatgcaaagtctcttgagcattctggatctttggatgatcctaatagaatcagtttggtgaaaagaaatgcagtgttgccttcaaagcctctgcaagacagagaagctatggatgataaaccaggtgtgagtggtcagcttccaaaaggaaaagctctagagctggctttgaagagaccacggccacctgttttgtctgtttgtagctcatcagagactccctatctattaaaagaaactaacaaaggaaatggtcaaggtgaagatagaaacttgttgtactattcaaagttaggcttagtgatcccatccagtggatctggttctggaaaccaaagcattgacaggagtggcccacttgttaagagtctcctcagacggtcattgtcgatggatagccaggttcctgtctattcaccttccatagatttgaaatcttcccagggatcatcttcggtgtccagtgatgcaccagggaatgtgttgtgtgctttatctcagaagtcatctttaaaagattgtagtgaaaaaacagccctagatgacaggcctcaagtgctacaaccgcatcgcctcaggtcctttagtgcttctcagtcaacagacagggagggagcttcccctgtgactgaggtgcgcataaagactgagcccagcagcccgctgtcggacccctcggacatcatccgcgtcactgtgggagatgcggcaacaacagcagctgcctcatcttcgtcggtcacaagagacctgtctctgaaaacagaagatgaccaaaaagacatgagcagactcccagcaaaaaggaggttccaagcggaccgaagattgccgtttaagaagttaaaggtgaatgagcacgggtctcctgtgtcagaagataattttgaggaaggctcaagccctactctccttgatgcagattttccagattctgatttgaataaagacgaatttggtgagttggaggggacgagaccaaacaaaaaatttaaatgcaaacattgccttaagatctttagatcaacagcaggtcttcaccgtcatgttaacatgtaccataacccagaaaagccctacgcttgtgacatctgtcacaagaggtttcacaccaacttcaaagtgtggacacactgtcagacccaacacggcatagtgaagaacccatcaccagcctctagttcacatgctgttttggatgaaaaattccaaagaaagctgattgacatagtgagagagagagaaattaagaaggccctgatcattaagttaaggcgcggcaagcctggttttcagggacagagtagctcccaagcacagcaagtcatcaagaggaacttgagatctcgagccaaaggagcttacatttgtacttactgcggaaaagcgtaccgctttctctctcaatttaagcagcatataaaaatgcatccaggagaaaaaccccttggagtaaataaagttgctaaaccaaaagagcatgctcctcttgcaagtccagtagaaaacaaggaggtttaccagtgccgcctctgtaatgctaagctctcttctctcctagagcaaggaagccacgagcggctgtgccggaacgcggccgtctgcccttactgcagcctcaggtttttctcgcccgagctgaagcaagaacacgagagcaagtgtgagtataagaagctgacctgcctcgagtgcatgcgcaccttcaagtcctctttcagcatctggcggcaccaggttgaagtccataatcagaacaacatggcacccaccgaaaacttttctttgcccgttttggaccacaatggtgatgtgactggttcttcaaggccccaatcccagcctgagcccaacaaagtaaaccacatcgtcaccacaaaagacgacaacgtgttcagtgattcttcagaacaagttaacttcgactcggaagattcctcttgtcttcccgaagaccttagtctttccaagcaactgaaaatccaagtcaaagaggagcctgtggaggaggctgaagaagaggcacccgaggccagcacagcccccaaagaagcgggtcctagcaaagaagccagcctgtggccctgcgagaagtgtgggaagatgttcacggtgcataagcagctggagcgtcaccaggagcttctgtgctctgtgaaaccatttatttgtcacgtgtgcaacaaagcttttcgcactaattttcgactctggagtcacttccaatcgcacatgtctcaggcttcagaggaatcggcacataaggaatctgaggtgtgccctgttcccacaaactctccctctccaccacctctgccaccgccaccaccactgcccaagatccagcctctggagcctgacagccccacaggcctgtccgaaaacccaactccagccacagaaaaactgtttgtgccccaagaatcagacacccttttttaccatgccccacccctttcagcaatcacatttaaaagacagtttatgtgtaaactttgccacaggacattcaagactgcatttagtctttggagtcacgaacaaacacacaattgaaagaccaacactttttacctatgggaggcagtccccagatttcaacctgaattgtgaaatgtgtcataagaaacaaaatattttttaaacaagaataataaaggttggagattgttacgcttgaaattaagttggaggcaaattgataattacttagtaatgtccttaactttagaaatacagcttttaaaatattgtggttctggaccttacaagaacaagatggtttgatttcattaatgttgaaattggattagtcttgattgtgtgcatggttcctcattccatggtgtcagtataatcatttaattgaggtttttggttttttattgattagtggaatactgtcgaagtattccttcttttaattattttagacacttgagttctagttaaatcttaaccatgttcttaagtccaaaataggaagaagtggagtagtttgcagtattgatttatatcttagactactttagcaataaaagataaatctcaactttaataagttatcctgacacttgataaaaataaatatttggtattttgtggtcatgtaaaacttctttttgtatgaaaattgtgagaaatttaaatcagcaatagtaacacttagatttttataaactaacaaaaacttgctctcagtcaatataataaatgatagttaaactctaaggaagacctgggaaatgaaaacaatttatggaagtcccctacagtcagtttataagggcttcagtagtgatagacattgttataaaaacttgtaccatgttacatgtacactgcaccacagtctaaattcagaccagcatttgaaggactgcacatatttcatttcctctgatttatgctgtcacaaattgaaaatctgagtgtagttaggacaaaaaacaaagctaaccatatggcactaattttgattttaacattagtgtaacaaataaggtcgggacatatatttacatagatcccagacactcaagaattagcacagctgatgtaaaattctaaattaccatttacttccagatagagcagaggagaaacacctcactgcagtttcaacatgctttccaagaacaatatatacgacatatacattttcctgcctctctcttgtgacaatttctgttagaatttgttgggggtctgatggttaaaatcatgggcaaggccattctctacatcattgcttaatatttcaaaaataggtattagagcactatcagtggtccaaaattagttttagctacttattttgctccatgggttttgggcttttcaaagaatactatgtataatttgtaattgaaagcctttcagtaggatatccaaagttcaatgtgtttcaaaagggaaaacttttacttgtgggggtgggagttagatgtattaaaaaaacgaaactacaaaatccttttaagaaagtaataccaatttagactctagtttgtgttacgaggtattctttcaaattttttttaaaagccaactactgtcattaagaaataattttagatttgtgctctagcagaaaataactctgtacccatcaatcttattgccaacattccataccagtggtaggaaagatattctcattttttttattgaaccagacatttttataaaatactgattgactttgtacattatggatattatatatgaaattttgccttgtattctttcacttgaaaaaactccaaaattccacaatattttagtagttaacttcctattctttcttaaatttgatggagaagggaaaataaattgcagttattgattcttgccatctttgttttcttaaagaaatctatgcattttaaggataaaactaaagcatatgggtttacatgaaacatcaggatggattattgtacattgaattcattccgcgtataatgtggtatttcttactctgtccatcttggtagctgtcacttcaaaagaagacagtttccctgagtaatcatcacctacatggccattagagtatctatcggtgataattccatgatacagagtatcttggcattataaattcagtatcccaggacctaaacctttatgctacattttcgaagattttttaaaaataatattgttaatcagtaaaaaaaaaaaatatttttgatctaaacataggttctgcatatctgttagattttaaaaatgactggtgttttgtcttcacatttttgtctaagcaaggaatataagatttcaaataaaattttgaaccaaaaacatttataatgccgttctggtttttctattactttttatactgtactttaaaagcattaggctgaaagagtttattttggtggtcaaaaaaaatatgcttccactcatgtaactattttaaatgttaagaagtaaaataatgaaagatatgttaattactttattcagtaaagttttttaagaatgtttatctcagccagtaggcaaatacttggtgtaaaacaagttggtcttaaattgttgcaactcattagctagtgaagatattcatgtaaatatattttaggattgtaattaattttgaaaatgtagaaagctctttattccatgtaagtatgcaggatgcctgcttttttatgcagttgtggaaagaatgtaaaatgttttaatatattctttgttaatctgagaacttgatactgaatcgtttatgtgggagaaggaaggagtaacataaaacatgtttttatcactcaaagtaagcaatggaggtaacaaatattgtgcattttaacagtaatatttgaagatttgtagaatattcacctttaaaactagttagtatgcatttataattttaccagaatatacaactaacaattcaacagtgatgttctttgcatttgtggggagatgtgtgatgttcttggttttctggtttggaatggaacgtttatagccttgcctgtaaaaatgtgccccagcacttaatgagtgaccgtttgaatccatatgtagtcccattggtgctaatgagagtagctgctgtgaaacaggaataaaatgtgtctgttcacggaggtgcggtgtggatgcacctacaaggccaactctctgatcagggtgagggagagatggaagaattaacagatctaaagttggcctttgttgtctcaaattgggtttgtacacacatgcatgcatgtgtgtatacaactgtaatctggaacttcaggaagtaaaattatttgaagtttcttagtaaaaagtaattaggtataattccaaatagatttctgtataaattgtatctaactggattacaagtcagtttgacaatttacgatgtctcagtgatgtttctgcaataattgtgaaatgcattattgatttaaataatgctgacacgtactctttaaaagtgttctttaacactgactactaaactttaagttttaaaaaataggttttcatttatggctttttgtggttttagcactttaagaagtttaattttttgtaatttttaatatgctctttcagtgtatctcagcgggtactccagcttgtggcattcccatgtgactggggagaagacaaaattggtgtttagattctggaggagaaaaaatgagttacaatgtcaggtgtttttaaaaattccttttagagacagtcttttgggaaccaaagtattttactgtaaatctttaaaataacagaattcagtgctctttcatttgttaatgctgtccagatttttcacacagttatactcagttaatactagttttcagaacattagtccaaggctatttcaagttttccattgaatatatgcttatggttaaaagaaaaacgaatggttttataattctgtgtattttgtcatatgccttagcagagtaagtcatttttccattttacttaggaataagctttttcgaactgaaaattcatggtaaaataggatttctatctaatgttaatccattgcttatttgtattcaattccattgtctacagtttgcttaaatgttgactaagaatgattggagtcaataaatttgtactgtattttgcttcga

SEQ ID NO: 213 - protein, 1066 aa, Homo sapiens
MEGLLHYINPAHAISLLSALNEERLKGQLCDVLLIVGDQKFRAHKNVLAASSEYFQSLFTNKENESQTVFQLDFCEPDAFDNVLNYIYSSSLFVEKSSLAAVQELGYSLGISFLTNIVSKTPQAPFPTCPNRKKVFVEDDENSSQKRSVIVCQSRNEAQGKTVSQNQPDVSHTSRPSPSIAVKANTNKPHVPKPIEPLHNLSLTEKSWPKDSSVVYAKSLEHSGSLDDPNRISLVKRNAVLPSKPLQDREAMDDKPGVSGQLPKGKALELALKRPRPPVLSVCSSSETPYLLKETNKGNGQGEDRNLLYYSKLGLVIPSSGSGSGNQSIDRSGPLVKSLLRRSLSMDSQVPVYSPSIDLKSSQGSSSVSSDAPGNVLCALSQKSSLKDCSEKTALDDRPQVLQPHRLRSFSASQSTDREGASPVTEVRIKTEPSSPLSDPSDIIRVTVGDAATTAAASSSSVTRDLSLKTEDDQKDMSRLPAKRRFQADRRLPFKKLKVNEHGSPVSEDNFEEGSSPTLLDADFPDSDLNKDEFGELEGTRPNKKFKCKHCLKIFRSTAGLHRHVNMYHNPEKPYACDICHKRFHTNFKVWTHCQTQHGIVKNPSPASSSHAVLDEKFQRKLIDIVREREIKKALIIKLRRGKPGFQGQSSSQAQQVIKRNLRSRAKGAYICTYCGKAYRFLSQFKQHIKMHPGEKPLGVNKVAKPKEHAPLASPVENKEVYQCRLCNAKLSSLLEQGSHERLCRNAAVCPYCSLRFFSPELKQEHESKCEYKKLTCLECMRTFKSSFSIWRHQVEVHNQNNMAPTENFSLPVLDHNGDVTGSSRPQSQPEPNKVNHIVTTKDDNVFSDSSEQVNFDSEDSSCLPEDLSLSKQLKIQVKEEPVEEAEEEAPEASTAPKEAGPSKEASLWPCEKCGKMFTVHKQLERHQELLCSVKPFICHVCNKAFRTNFRLWSHFQSHMSQASEESAHKESEVCPVPTNSPSPPPLPPPPPLPKIQPLEPDSPTGLSENPTPATEKLFVPQESDTLFYHAPPLSAITFKRQFMCKLCHRTFKTAFSLWSHEQTHN

SEQ ID NO: 214 - DNA, 3729 bp, Homo sapiens
  source 1..3729: mol_type = other DNA
ggagcctgtcctccatgttttataagtattgacattacacagtgttaacaatgcatccacagagcttggctgaagaggaaataaaaacagaacaggaggtggtagagggcatggatatctctactcgctccaaagatcctggctctgcagagagaacagcccagaaaagaaagttccccagccctccacattcttccaatggccactcgccgcaggacacatcaacaagccccattaaaaagaaaaagaaacctggcttactgaacagtaacaataaggagcaggatggacggaatgatttctactgctgggtttgtcaccgggaaggccaagtcctttgctgtgagctctgtccccgggtttatcacgctaagtgtctgagactgacatcggaaccagagggggactggttttgtcctgaatgtgagaaaattacagtagcagaatgcatcgagacccagagtaaagccatgacaatgctcaccattgaacagttatcctacctgctcaagtttgccattcagaaaatgaaacagccagggacagatgcattccagaagcccgttccattggaacagcaccctgactatgcggaatacatcttccatccaatggacctttgtacattggaaaagaatgcgaaaaagaaaatgtatggctgcacagaagccttcctggctgatgcaaagtggattttgcacaactgcatcatttataatgggggaaatcacaaattgacgcaaatagcgaaagtagtcatcaaaatctgtgaacatgagatgaatgaaatcgaagtatgtccagaatgttatctagctgcttgccaaaaacgagataactggttttgtgagccttgtagcaatccacatcctttggtctgggccaaactgaaggggtttccattctggcctgcaaaagctctaagggataaagacgggcaggtcgatgcccgattctttggacaacatgacagggcctgggttccaataaataattgctacctcatgtctaaagaaattcctttttctgtgaaaaagactaagagcatcttcaacagtgccatgcaagagatggaggtttacgtggagaacatccgcaggaagtttggggtttttaattactctccatttaggacaccctacacacccaacagccagtatcaaatgctgctcgatcccaccaaccccagcgccggcactgccaagatagacaagcaggagaaggtcaagctcaactttgacatgacggcatcccccaagatcctgatgagcaagcctgtgctgagtgggggcacaggccgccggatttccttgtcggatatgccgcgctcccccatgagcacaaactcttctgtgcacacgggctccgacgtggagcaggatgctgagaagaaggccacgtcgagccacttcagtgcgagcgaggagtccatggacttcctggataagagcacagcttcaccagcctccaccaagacgggacaagcagggagtttatccggcagcccaaagcccttctctcctcaactgtcagctcctatcacgacgaaaacggacaaaacctccaccaccggcagcatcctgaatcttaacctggatcgaagcaaagctgagatggatttgaaggagctgagcgagtcggtccagcaacagtccacccctgttcctctcatctctcccaagcgccagattcgtagcaggttccagctgaatcttgacaagaccatagagagttgcaaagcacaattaggcataaatgaaatctcggaagatgtctatacggccgtagagcacagcgattcggaggattctgagaagtcagatagtagcgatagtgagtatatcagtgatgatgagcagaagtctaagaacgagccagaagacacagaggacaaagaaggttgtcagatggacaaagagccatctgctgttaaaaaaaagcccaagcctacaaacccagtggagattaaagaggagctgaaaagcacgtcaccagccagcgagaaggcagaccctggagcagtcaaggacaaggccagccctgagcctgagaaggacttttccgaaaaggcaaaaccttcacctcaccccataaaggataaactgaagggaaaagatgagacggattccccaacagtccatttgggcctggactctgattcagagagcgaacttgtcatagatttaggagaagaccattctgggcgggagggtcgaaaaaataagaaggaacccaaagaaccatctcccaaacaggatgctgtccagcagaaggagatcacacagagcccatccacgtccaccatcaccctggtgaccagcacacagtcatcgcccctggtcaccagctcggggtccatgagcacccttgtgtcctcagtcaacgctgacctgcccatcgccactgcctcagctgatgtcgccgctgatattgccaagtacactagcaaaatgatggatgcaataaaaggaacaatgacagaaatatacaacgatctttctaaaaacactactggaagcacaatagctgagattcgcaggctgaggatcgagatagagaagctccagtggctgcaccagcaagagctctccgaaatgaaacacaacttagagctgaccatggcggagatgcggcagagcctggagcaggagcgggaccggctcatcgccgaggtgaagaagcagctggagttggagaagcagcaggcggtggatgagaccaagaagaagcagtggtgcgccaactgcaagaaggaggccatcttttactgctgttggaacaccagctactgtgactacccctgccagcaagcccactggcctgagcacatgaagtcctgcacccagtcagctactgctcctcagcaggaagcggatgctgaggtgaacacagaaacactaaataagtcctcccaggggagctcctcgagcacacaatcagcaccttcagaaacggccagcgcctccaaagagaaggagacgtcagctgagaaaagcaaggagagtggctcgacccttgacctttctggctccagagagacgccctcctccattctcttaggctccaaccaaggctctgaccattcccggagtaataaatccagttggagcagcagtgatgagaagaggggatcgacacgttccgatcacaacaccagtaccagcacgaagagcctcctcccgaaagagtctcggctggacaccttctgggactagcagtgaatcgggacacaaaccacccaccccattgggagaaaaacccagacgccaggaaaagaagaaacaacaaaggcaggagaacagccactttcagacttgaaaatgacaaaaccctcagttgagcctgagcccccggcgcgggggctgctacactacaggacacccagcatcggctttgactgcagactgttcacccacacgagccctgtgcttttggtgtaaataatgtacaatttgtggatgtcattgaatctagaggactttcccctttttatatttgtattaactttaacttattaaaaaaaaaaaaagaaaaagaaaaacgatttaaaaaaaaaaaaaaaagcaaccaaccccaacaacaaaaaagaatgttttggtattggagaagggatggtcagttagcctgtctgtcacacgacggaatggatactgggcccggggaccactttcatactcacgtcctcatccttggatacccaggggagggcgaaccgttttcgctcgtgtg

SEQ ID NO: 215 - protein, 1054 aa, Homo sapiens
MHPQSLAEEEIKTEQEVVEGMDISTRSKDPGSAERTAQKRKFPSPPHSSNGHSPQDTSTSPIKKKKKPGLLNSNNKEQDGRNDFYCWVCHREGQVLCCELCPRVYHAKCLRLTSEPEGDWFCPECEKITVAECIETQSKAMTMLTIEQLSYLLKFAIQKMKQPGTDAFQKPVPLEQHPDYAEYIFHPMDLCTLEKNAKKKMYGCTEAFLADAKWILHNCIIYNGGNHKLTQIAKVVIKICEHEMNEIEVCPECYLAACQKRDNWFCEPCSNPHPLVWAKLKGFPFWPAKALRDKDGQVDARFFGQHDRAWVPINNCYLMSKEIPFSVKKTKSIFNSAMQEMEVYVENIRRKFGVFNYSPFRTPYTPNSQYQMLLDPTNPSAGTAKIDKQEKVKLNFDMTASPKILMSKPVLSGGTGRRISLSDMPRSPMSTNSSVHTGSDVEQDAEKKATSSHFSASEESMDFLDKSTASPASTKTGQAGSLSGSPKPFSPQLSAPITTKTDKTSTTGSILNLNLDRSKAEMDLKELSESVQQQSTPVPLISPKRQIRSRFQLNLDKTIESCKAQLGINEISEDVYTAVEHSDSEDSEKSDSSDSEYISDDEQKSKNEPEDTEDKEGCQMDKEPSAVKKKPKPTNPVEIKEELKSTSPASEKADPGAVKDKASPEPEKDFSEKAKPSPHPIKDKLKGKDETDSPTVHLGLDSDSESELVIDLGEDHSGREGRKNKKEPKEPSPKQDAVQQKEITQSPSTSTITLVTSTQSSPLVTSSGSMSTLVSSVNADLPIATASADVAADIAKYTSKMMDAIKGTMTEIYNDLSKNTTGSTIAEIRRLRIEIEKLQWLHQQELSEMKHNLELTMAEMRQSLEQERDRLIAEVKKQLELEKQQAVDETKKKQWCANCKKEAIFYCCWNTSYCDYPCQQAHWPEHMKSCTQSATAPQQEADAEVNTETLNKSSQGSSSSTQSAPSETASASKEKETSAEKSKESGSTLDLSGSRETPSSILLGSNQGSDHSRSNKSSWSSSDEKRGSTRSDHNTSTSTKSLLPKESRLDTFWD

SEQ ID NO: 216 - DNA, 6234 bp, Homo sapiens
  source 1..6234: mol_type = other DNA
acttgacttaaactctggggcccgggaggccgccggttttctccccgcttgccggggtggtcctcttccctttgtcggaccaaagaagtaaacactgtgtggagagggactgacgtgtttggagggaaatgggaatgtacacgataattaaagagtaaagttgtgctcaacgctgtttacttctaattatttcctgattcacaaattaatttttgcaattcacaacttcaagaatacttggactattggattcaatccatagtaatctgcaaaagaagagaagcagaattatacctagaagtctactaatggacagttagtcacccacctacatgttgagattcctgacattcagacaactgacttgtaactgacttataactgacttgtaatacactgctactatatcaaaccgacaatgaattggaatgaaaaaccaaagagtgctacattaccaccactgtatcctaaaagccagccaccttttttgcaccagtctttaataaaccaaattaccacaacatctcagagttctttcagctatcctggaagtaaccaagaagcatgcatgtatcccggtaattcaaatccaatttcacagccactgctgaatatccaaaattatcctcaacaaatttctgtttctgatatgcataatgggacagttgtggcctcacacacttcagtagaaagaataacatatgcaaatgttaatggacccaaacaactaactcacaatttgcagatgtcttcaggagttacccaaaacgtatggttgaactcaccaatgaggaatcctgtgcattctcatataggggcaactgtatctcatcaaactgattttggagctaacgtacccaatatgccggcactacagagtcaactgataacatcagatacctattctatgcaaatgcagatgatcccttctaattctacacgacttcctgtagcttaccaaggaaatcagggacttaaccagtctttttcagagcaacaggttgattggacacaacagtgtatatctaagggactgacttacccagattacagaccacctccaaagctataccgttactcaccacaaagctttttaccagattctaccattcaaaaacaaaactttataccacatacatcattgcaagttaaaaatagtcagcttctaaattctgtattaactttaccatcaaggcagacctcagctgtaccatcacagcagtatgccacgcaaactgacaaaagacctcctcctcctccttacaactgtagatatggaagccagcctttgcaaagtactcagcatattactaaacacttgtctatggaagttcctcagagtcgagaaatgctgtcatctgaaataaggaccagctttcaacagcagtggcaaaaccctaatgaaaatgtcagcacaattggaaatttcactaacttgaaagtaaataccaacagcaaacagccttttaacagtcccattagatcttctgtggatggtgttcagactcttgctcaaactaatgaagagaaaataatggattcttgcaatccaacttcaaatcaagtactggacacaagtgttgcaaaagaaaagctagtaagggatattaaaacattagtagagataaaacagaagttttcagaacttgcaaggaaaattaaaatcaataaagatcttttgatggcagcaggttgtattaaaatgactaatacttcttatagtgaaccagctcagaattctaaattgtctctaaaacaaactgccaaaatccagtctggaccccagataactccagtaatgccagagaatgcagagagacaaacaccaacagtagtggaatctgcagaaacaaataagactcaatgtatgttgaattctgacattcaggaagtcaattgcagaaggtttaaccaagttgattctgttttaccaaatcctgtctattctgaaaagcggccaatgccagactcatctcatgatgtgaaagttctcacttcaaagacatcagctgttgagatgacccaggcagtattgaatactcagctttcatcagaaaatgttaccaaagttgagcaaaattcaccagcagtttgtgaaacaatttctgttcccaagtccatgtccactgaggaatataaatcaaaaattcaaaatgaaaatatgctacttctcgctttgctttcacaggcacgtaagactcagaagacagtattaaaagatgctaatcaaactattcaggattctaaaccagacagttgtgaaatgaatccaaatacccaaatgactggtaaccaactgaatttgaagaacatggaaactccaagtacttctaatgtaagtggcagggttttggacaactccttttgcagtggacaagaatcctcaacaaaaggaatgcctgctaaaagtgacagtagctgttccatggaagtgctagcaacctgtctttccctgtggaaaaagcaaccttcagatactgcaaaagaaaaggagtgtgataaactcagaacaaacacaacagcagttggaatttcaaagcctgctaacatccacgttaagagtccttgttcagttgtgggaaattcaaattctcagaataaaataagtaatccctcacagcagacagctttgtcgatggtaatgcacaattatgagtcttcaggtataaatataacaaagggaacagaacttcagatagctgtagtgtcaccgttagttctgtcagaggtcaaaacattgtctgtcaaaggaataacacctgcagtgttacctgaaacagtgtatcccgttattaaagaaggcagtgtttgtagtttacaaaatcaattggcagaaaatgcaaaggcaactgctgctttgaaagttgatgttagtggaccagtagcaagtacagcaacatcaaccaagatttttccactaactcagaaggaaaagcagaatgagtcaactaatggtaattcagaagtcacacctaatgtcaatcaaggaaagcataacaaattagagtcagctatccattctcctatgaacgatcagcaaatctcacaggagtcaaggaatagtactgttgtgagtagtgatacattacagattgacaatatttgttctctggttgaaggtgatacctcttacaattcccaaatagcaaagatattcagctctcttcccttgaaaatggttgagccacagaaaccttctctacccaatcagcaagggattggcagcagagaaccagaaaaacaattagataataccactgaaaataaagactttggttttcaaaaagataaacctgtacagtgcacagatgtttcacataaaatatgtgatcagtcaaagtcagagccacccttagagtcatcttttaacaatcttgaaacaaacagagttattctagagaaaagtagtttggagcatgccactgaaaaaagcacagctaacgatacgtgctcgtcagctgctattcaggaggatatttaccctcaggaaatagatgcatccagcaactatactccccaagatcctgcaagaaatgaaatccacagtgataaggcacctgtcttatacctacatgaccagctgtcagaacttctaaaagagtttccttatggcattgaggctgtgaatacacgtgaaggttctgtgggccagcaaactacataccagacctcagaagatcaaactgctgataaaaccagttctgactccaaagacccagcagatcaaatacaaattacaatattaagctcagagcaaatgaaagaaatatttcctgaacaggatgatcaaccctatgtagtagacaagttggcagaacctcagaaagaagagcccatcacagaagtagttagccagtgtgacctgcaggcacctgcagctggacaaagtcgtgattctgtgatactggactctgagaaagatgatatccactgctgtgcattgggctggctctccatggtttacgaaggagtaccccagtgtcagtgtaattccatcaagaactcatcttcagaggaagagaaacaaaaagagcagtgttctcctttggataccaacagttgtaaacaaggagagagaacttctgatagagatgtcactgttgttcaatttaagagccttgtaaataatccaaagactcctccagatgggaaaagtcattttcctgaactacaagacgacagtagaaaagatacacccaaaacaaaacataaaagcttaccaaggacagaacaagaattagttgctggtcagttttcatctaaatgtgataaactaaatcccttgcaaaatcacaaaagaaaaaaattgaggtttcacgaggtaacctttcactccagtaataaaatgacagcatcttatgaacaagcttctcaggaaacccgacagaagaaacatgtaacacagaactcacgtccactaaaaacaaaaacagcttttttgccaaataaagatgtgtataagaagcatagttctttgggacagtcattatcaccagaaaagataaaattgaaactcaaatcagttagcttcaaacaaaaacgaaagttagaccaagggaacgtattagatatggaagtaaagaaaaagaaacatgataaacaagaacagaaaggaagtgtgggagctacattcaaattaggtgactctttgtcaaacccaaacgaaagagccattgttaaagaaaagatggtatcaaatactaagtctgtagacacgaaagcgagttcatctaaatttagtagaattctaactcctaaggagtatttacaaaggcagaagcataaagaagctctgagtaataaagcatcgaagaaaatctgtgtgaaaaacgtgccatgtgattctgaacatatgagaccaagtaaacttgccgtgcaggttgaaagttgtgggaaatcaaatgagaaacacagcagcggcgtgcagacctctaaagaatcattaaatggcttgacaagccatggtaaaaacctcaaaatccaccattctcaggagtctaaaacatacaacattctaaggaatgttaaagaaaaagttggtgggaagcagcctgataaaatatggattgataagactaaattagacaaattaaccaatataagcaacgaagctcaattcagccaaatgcctccccaagtaaaggatcaaaagaaattatatctgaatagagttgggtttaaatgcactgaacgtgaaagcatttctctcaccaaattagaaagttcacccaggaagcttcataaagataagagacaggaaaataaacataagacctttttaccggtgaaaggtaacacagaaaaatcaaacatgctggagtttaaattatgtccagatatcttactaaagaatacaaactctgtggaagaacggaaggatgtaaagcctcatcctaggaaggagcaagcccctctgcaagtttcaggaataaaaagtacaaaagaagactggttaaaatttgttgctacaaagaaaaggacacagaaagacagccaagagagagataatgttaattcaagactctcgaagagaagcttcagtgcagatggatttgagatgctacaaaacccagtaaaagattcaaaagaaatgtttcaaacctacaaacagatgtacctggagaagagaagcagaagccttggtagcagtcctgtaaaataattacaagatgtggttttgtaattgccactgggaaatttctttccttttctgttcaaaatatttcgctgaaactaatgagaaatgccatgataaagatttctcagagtttggttcccactttcattgtatttcattgaaagtgcttaattaaaatggcttgagaactttgggtagccatgtgtaagaaatggatggtattcaccggggaaacaaggtatttgaatttctactttattgaaccagatttaccattattttaaaaggaatgcttatacaaatcaatttgaaattctacccatcttgagggaggaccgttcctcagttaaggacttgtttatttaaatgggactgtaaatatgttttggtttctaagctatattagcaaaatttatttttcaaaaatgcccactgtgatgtgaatgtcaaaatatattcttaagtgttttataactaattgtaaactttttttcagaagtcttattttatacttgtgaaactgaacacaattttgggacaacgtttaaacattacttttcatacttgaaataaacatttattttttaaaaaactaa

SEQ ID NO: 217 - protein, 1747 aa, Homo sapiens
MNWNEKPKSATLPPLYPKSQPPFLHQSLINQITTTSQSSFSYPGSNQEACMYPGNSNPISQPLLNIQNYPQQISVSDMHNGTVVASHTSVERITYANVNGPKQLTHNLQMSSGVTQNVWLNSPMRNPVHSHIGATVSHQTDFGANVPNMPALQSQLITSDTYSMQMQMIPSNSTRLPVAYQGNQGLNQSFSEQQVDWTQQCISKGLTYPDYRPPPKLYRYSPQSFLPDSTIQKQNFIPHTSLQVKNSQLLNSVLTLPSRQTSAVPSQQYATQTDKRPPPPPYNCRYGSQPLQSTQHITKHLSMEVPQSREMLSSEIRTSFQQQWQNPNENVSTIGNFTNLKVNTNSKQPFNSPIRSSVDGVQTLAQTNEEKIMDSCNPTSNQVLDTSVAKEKLVRDIKTLVEIKQKFSELARKIKINKDLLMAAGCIKMTNTSYSEPAQNSKLSLKQTAKIQSGPQITPVMPENAERQTPTVVESAETNKTQCMLNSDIQEVNCRRFNQVDSVLPNPVYSEKRPMPDSSHDVKVLTSKTSAVEMTQAVLNTQLSSENVTKVEQNSPAVCETISVPKSMSTEEYKSKIQNENMLLLALLSQARKTQKTVLKDANQTIQDSKPDSCEMNPNTQMTGNQLNLKNMETPSTSNVSGRVLDNSFCSGQESSTKGMPAKSDSSCSMEVLATCLSLWKKQPSDTAKEKECDKLRTNTTAVGISKPANIHVKSPCSVVGNSNSQNKISNPSQQTALSMVMHNYESSGINITKGTELQIAVVSPLVLSEVKTLSVKGITPAVLPETVYPVIKEGSVCSLQNQLAENAKATAALKVDVSGPVASTATSTKIFPLTQKEKQNESTNGNSEVTPNVNQGKHNKLESAIHSPMNDQQISQESRNSTVVSSDTLQIDNICSLVEGDTSYNSQIAKIFSSLPLKMVEPQKPSLPNQQGIGSREPEKQLDNTTENKDFGFQKDKPVQCTDVSHKICDQSKSEPPLESSFNNLETNRVILEKSSLEHATEKSTANDTCSSAAIQEDIYPQEIDASSNYTPQDPARNEIHSDKAPVLYLHDQLSELLKEFPYGIEAVNTREGSVGQQTTYQTSEDQTADKTSSDSKDPADQIQITILSSEQMKEIFPEQDDQPYVVDKLAEPQKEEPITEVVSQCDLQAPAAGQSRDSVILDSEKDDIHCCALGWLSMVYEGVPQCQCNSIKNSSSEEEKQKEQCSPLDTNSCKQGERTSDRDVTVVQFKSLVNNPKTPPDGKSHFPELQDDSRKDTPKTKHKSLPRTEQELVAGQFSSKCDKLNPLQNHKRKKLRFHEVTFHSSNKMTASYEQASQETRQKKHVTQNSRPLKTKTAFLPNKDVYKKHSSLGQSLSPEKIKLKLKSVSFKQKRKLDQGNVLDMEVKKKKHDKQEQKGSVGATFKLGDSLSNPNERAIVKEKMVSNTKSVDTKASSSKFSRILTPKEYLQRQKHKEALSNKASKKICVKNVPCDSEHMRPSKLAVQVESCGKSNEKHSSGVQTSKESLNGLTSHGKNLKIHHSQESKTYNILRNVKEKVGGKQPDKIWIDKTKLDKLTNISNEAQFSQMPPQVKDQKKLYLNRVGFKCTERESISLTKLESSPRKLHKDKRQENKHKTFLPVKGNTEKSNMLEFKLCPDILLKNTNSVEERKDVKPHPRKEQAPLQVSGIKSTKEDWLKFVATKKRTQKDSQERDNVNSRLSKRSFSADGFEMLQNPVKDSKEMFQTYKQMYLEKRSRSLGSSPVK
